(19) United States
(12) Patent Application Publication
(10) Pub. No.: US 2025/0386788 A1
(43) Pub. Date: Dec. 25, 2025

(54) USE OF PAIRED GENES IN HYBRID BREEDING

(71) Applicant: KWS SAAT SE & Co. KGaA, Einbeck (DE)

(72) Inventors: Katrin DIETRICH, Einbeck (DE); Klaus SCHMIDT, Einbeck (DE)

(73) Assignee: KWS SAAT SE & Co. KGaA, Einbeck (DE)

(21) Appl. No.: 19/106,507

(22) PCT Filed: Aug. 25, 2023
(86) PCT No.: PCT/EP2023/073320

§ 371 Date: Feb. 25, 2025

(30) Foreign Application Priority Data
Aug. 26, 2022 (EP) 22192484.8

(51) Int. Cl. A01H 1/04; A01H 1/02; C12Q 1/6895

(52) U.S. Cl. CPC A01H 1/045; A01H 1/023; C12Q 1/6895; C12Q 2600/13

(57) ABSTRACT

The present invention relates to linked gene pairs for use in plant breeding, such as hybrid breeding. The present invention in particular relates to the Myb80 and Dwarf11 genes, mutations of which respectively result in genetic male sterility and dwarfism. Combined mutations allow selection of genetic male sterile plants based on a dwarfism phenotype.

### FIELD OF THE INVENTION

[0001] The invention relates to hybrid seed production, in particular in cereals, involving the use of male sterile plants. The invention further relates to methods for identifying such male sterile plants.

### BACKGROUND OF THE INVENTION

[0002] For every hybrid seed production system, a prerequisite is the availability of male sterile lines. There are two different types of male sterility described: Cytoplasmic male sterility (CMS) caused by a mutation in the mitochondrial genome as well as Genic male sterility (GMS) caused by mutations in the nuclear genome. CMS and GMS facilitate hybrid seed production for many crops and thus allow breeders to harness yield gains associated with hybrid vigor (heterosis).

[0003] Cytoplasmic male sterility (CMS) is a maternally inherited condition in which a plant is unable to produce functional pollen. In CMS, layers of interaction between mitochondrial and nuclear genes control its male specificity, occurrence, and restoration of fertility. It occurs in many plant species and is often associated with chimeric mitochondrial open reading frames. In a number of cases, transcripts originating from these altered open reading frames are translated into unique proteins that appear to interfere with mitochondrial function and pollen development. Nuclear restorer (Rf or Fr) genes function to suppress the deleterious effects of CMS-associated mitochondrial abnormalities by diverse mechanisms. Due to the different origins of the causative defect, the CMS is only inherited through the female germline, and to regain full fertility requires an additional factor in the hybrid seeds (Restorer gene) This makes breeding complicated, and sometimes it is problematic to regain back full fertility due to the lack of functional restorer genes.

[0004] Genic male sterility (GMS) is caused only by genes encoded in the nuclear genome. In GMS, nuclear Male sterility (Ms) genes control the male sterility condition without influence of cytoplasmic sequences. In the simplest genetic model, there are three possible genotypes for the nuclear locus Ms, in which the male sterile phenotype is conditioned by recessive ms alleles. A Mendelian inheritance pattern can be observed, in which the offspring of a male sterile genotype (female line) could be entirely male fertile or segregate 50% male sterile: 50% male fertile depending on whether the parental line (male fertile) is homozygous or heterozygous, respectively. The use of GMS in plant breeding and hybrid seed production involves three different lines: i) a male sterile (female parent), ii) a maintainer, and iii) a restorer (male parent) line. The male sterile line is maintained using pollen of a maintainer line, which presents identical genotype (isoline), except for the presence of a dominant Ms allele.

[0005] When using GMS systems, fertility may already be restored in the heterozygous stage, as the sterility is only observed in plants homozygous for the sterility allele of the gene. This causes other problems, as there is no easy way to produce the male sterile female plants, and importantly also to identify the male sterile female plants, in particular at an early stage, such as at the seed stage.

[0006] It is an objective of the present invention to address one or more of the above shortcomings.

### SUMMARY OF THE INVENTION

[0007] The invention describes the discovery of a very specific pair of genes in the genome of cereals providing a specific combination of expected phenotypes: male sterility and reduced plant height/smaller seed size.

[0008] This combination of phenotypes can be used for the development of an alternative hybrid system in different cereal species. For some cereal species, there are no hybrid systems available at all (e.g. oat), for other cereal species, this alternative hybrid system is supposed to be beneficial compared to the existing hybrid systems.

[0009] Getting rid of the current limitations of the existing hybrid systems in cereals and develop a new system applicable in all cereals also opens new possibilities for niche crops like oat, where the breeding progress is slow. As it was observed in other crops, a functional hybrid system is expected to result in a significant increase in yield due to the heterosis.

[0010] The present invention therefore is to provide a system to be able to maintain and produce male sterile plants form a GMS system in a cost-efficient way via coupling the male sterility phenotype with an easy to screen phenotypic marker. As the sterility can only be seen at the late plant developmental phase, the phenotype linked to the sterility should be visible already at the seed level. However, there might be other suitable phenotypes which can be screened for already at very early phases of plant development.

[0011] The general principle of finding specific gene pairs in the genome of a plant species may equally be applied to get a combination of male sterility and a morphological trait in all plant species including dicot species. So, the system of the present invention can be applied to crop species where no hybrid system is even foreseeable at the moment.

[0012] One aspect of the present invention therefore provides a general method of finding specific gene pairs in the genome of a plant species to get a combination of male sterility and a morphological trait in all plant species including dicot species.

[0013] A specific gene pair can be selected in a manner that one gene causes male sterility (for instance Myb80), and the other gene relates to a particular phenotype (for instance Dwarf11). The screening parameters are set such that the physical distance between the two genes is less than 1 Mbp. The assumption is that this physical distance is sufficient for a close genetic linkage of the two genes, so they are supposed to be inherited as one genetic locus.

[0014] Another aspect of the present invention is to provide a system to be able to maintain and produce male sterile plants form a GMS system in a cost-efficient way via coupling the male sterility phenotype with an easy to screen phenotypic marker.

[0015] A more specific aspect of the present invention is to provide a system, which is capable to maintain and produce male sterile plants from a GMS system including Myb80 and Dwarf11 mutants.

[0016] The present invention is in particular captured by any one or any combination of one or more of the below numbered statements 1 to 106, with any other statement and/or embodiments.

[0017] 1. A method for generating or modifying a plant or plant part, comprising
[0018] a) providing a plant or plant part not expressing or having reduced expression, activity, and/or stability of the MYB80 gene product; and/or having a (homozygous or heterozygous) mutation in the Myb80 gene or regulatory sequence thereof;
[0019] b) reducing or eliminating expression, activity, and/or stability of the DWARF11 gene product in said plant or plant part; and/or introducing a (homozygous or heterozygous) mutation in the Dwarf11 gene or regulatory sequence thereof.

[0020] 2. The method according to statement 1, wherein said plant or plant part comprises one or more (homozygous or heterozygous) mutation in the MYB80 gene.

[0021] 3. A method for generating or modifying a plant or plant part, comprising
[0022] a) providing a plant or plant part not expressing or having reduced expression, activity, and/or stability of the DWARF11 gene product; and/or having a (homozygous or heterozygous) mutation in the Dwarf11 gene or regulatory sequence thereof;
[0023] b) reducing or eliminating expression, activity, and/or stability of the MYB80 gene product in said plant or plant part; and/or introducing a (homozygous or heterozygous) mutation in the Myb80 gene or regulatory sequence thereof.

[0024] 4. The method according to statement 3, wherein said plant or plant part comprises one or more (homozygous or heterozygous) mutation in the DWARF11 gene.

[0025] 5. A method for generating or modifying a plant or plant part, comprising
[0026] a) providing a plant or plant part;
[0027] b) simultaneously or sequentially in either order b1) reducing or eliminating expression, activity, and/or stability of the MYB80 gene product and the DWARF11 gene product in said plant or plant part; and/or b2) (homozygously or heterozygously) mutating the Myb80 gene and the Dwarf11 gene or regulatory sequences thereof; or a combination of b1) and b2).

[0028] 6. The method according to any of statements 1 to 5, wherein reducing or eliminating expression, activity, and/or stability comprises introducing a (homozygous or heterozygous) mutation in the gene.

[0029] 7. The method according to any of statements 1 to 6, wherein reducing or eliminating expression, activity, and/or stability comprises knocking down the gene transcript or knocking out the gene, preferably by RNAi or CRISPR/Cas.

[0030] 8. A method for generating a plant or plant part, comprising
[0031] a) crossing a first plant and a second plant; wherein said first plant and/or said second plant have a heterozygous or homozygous mutation in the MYB80 gene and the DWARF11 gene on the same chromosome;
[0032] b) harvesting seeds.

[0033] 9. The method according to statement 8, further comprising
[0034] c) selecting seeds or plants grown therefrom comprising a homozygous mutation in the DWARF11 gene.

[0035] 10. The method according to any of statements 1 to 9 wherein said mutation is a nonsense or missense mutation.

[0036] 11. The method according to any of statements 1 to 10, wherein said mutation is a frameshift mutation.

[0037] 12. The method according to any of statements 1 to 11, wherein said mutation is an indel mutation.

[0038] 13. The method according to any of statements 1 to 12, wherein said mutation is a dominant (negative) mutation or a recessive mutation.

[0039] 14. The method according to any of statements 1 to 13, wherein said mutation is a knock-out or knock-down mutation.

[0040] 15. The method according to any of statements 1-14, wherein said mutation is in the first exon.

[0041] 16. The method according to any of statements 1 to 15, wherein said mutation is in the coding sequence, a splicing signal or affecting a splice signal, or a regulatory element.

[0042] 17. The method according to any of statements 1 to 16, wherein said mutation is introduced by (random) mutagenesis, preferably TILLING.

[0043] 18. The method according to any of statements 1 to 17, wherein said mutation is introduced by site-directed mutagenesis.

[0044] 19. The method according to any of statements 1 to 18, wherein said mutation is introduced by gene-editing, preferably by CRISPR/Cas.

[0045] 20. The method according to any of statements 1 to 19, wherein said method is a method for generating or modifying a plant or plant part which is male sterile.

[0046] 21. The method according to any of statements 1 to 20, wherein said method is a method for generating or modifying a plant or plant part which is genetic male sterile.

[0047] 22. The method according to any of statements 1 to 21, wherein said plant or plant part is from the family of Poaceae.

[0048] 23. The method according to any of statements 1 to 22, wherein said plant or plant part is from the subfamily of Pooideae, Panicoideae, Chloridoideae, Pharoideae, Bambusoideae, or Oryzoideae.

[0049] 24. The method according to any of statements 1 to 23, wherein said plant or plant part is from the genus Aegilops, Brachypodium, Cenchrus, Chasmanthium, Digitaria, Eleusine, Eragrostis, Hordeum, Leersia, Lolium, Miscanthus, Oropetium, Oryza, Panicum, Paspalum, Pharus, Phyllostachys, Saccharum, Secale, Setaria, Sorghum, Thinopyrum, Triticum, Urochloa, Avena, Poa, Phleum, Festuca, or Deschampsia.

[0050] 25. The method according to any of statements 1 to 24, wherein said plant or plant part is selected from the species Aegilops tauschii, Brachypodium distachyon, Brachypodium mexicanum, Brachypodium stacei, Brachypodium sylvaticum, Cenchrus purpureus, Chasmanthium laxum, Digitaria exilis, Eleusine coracana, Eleusine coracana, Eragrostis curvula, Eragrostis tef, Hordeum vulgare, Leersia perrieri, Lolium perenne, Miscanthus sinensis, Oropetium thomaeum, Oryza alta, Oryza brachyantha, Oryza glaberrima, Oryza glumipatula, Oryza longistaminata, Oryza meridionalis, Oryza nivara, Oryza punctata, Oryza rufipogon, Oryza sativa Indica Group, Oryza sativa Japonica Group, Panicum hallii FIL2, Panicum hallii HAL2, Panicum virgatum, Paspalum vaginatum, Pharus latifolius, Phyllostachys edulis, Saccharum spontaneum, Secale cereale, Setaria italica, Setaria viridis, Sorghum bicolor, Thinopyrum intermedium, Triticum aestivum, Triticum dicoccoides, Triticum spelta, Triticum turgidum, or 25 Urochloa fusca.

[0051] 26. The method according to any of statements 1 to 25, wherein said plant or plant part is a crop plant or plant part.

[0052] 27. The method according to any of statements 1 to 26, wherein said MYB80 gene and said DWARF11 gene are located on the same chromosome.

[0053] 28. The method according to any of statements 1 to 27, wherein said MYB80 gene and said DWARF11 gene are located on the same chromosomal arm.

[0054] 29. The method according to any of statements 1 to 28 wherein the physical distance between said MYB80 gene and said DWARF11 gene in the genome of said plant or plant part is at most 1 Mbp.

[0055] 30. The method according to any of statements 1 to 29, wherein the genetic distance between said MYB80 gene and said DWARF11 gene in the genome of said plant or plant part is at most 1 CM.

[0056] 31. The method according to any of statements 1 to 23, wherein said plant or plant part is not from the genus Zea.

[0057] 32. The method according to any of statements 1 to 23, wherein said plant or plant part is not from the species Zea mays.

[0058] 33. The method according to any of statements 1 to 23, wherein said plant or plant part is not from the species Triticum urartu.

[0059] 34. A method for selecting a plant or plant part, comprising
[0060] a) providing a mixture of plants or plant parts resulting from a cross between a first plant and a second plant; wherein said first plant and/or said second plant have a heterozygous or homozygous mutation in the MYB80 gene and the DWARF11 gene on the same chromosome;
[0061] b) selecting a plant or plant part comprising a homozygous mutation in the DWARF11 gene.

[0062] 35. The method according to any of statements 9 to 34, wherein selecting a plant or plant part comprising a homozygous mutation in the DWARF11 gene comprises phenotypic selection.

[0063] 36. A method for identifying and/or selecting a plant or plant part, comprising screening for the presence of a homozygous mutation in the DWARF11 gene in (the genome of) a plant or plant part resulting from a cross between a first plant and a second plant; wherein said first plant and/or said second plant have a heterozygous mutation in the MYB80 gene and the DWARF11 gene on the same chromosome; and optionally selecting a plant or plant part comprising a homozygous mutation in the DWARF11 gene.

[0064] 37. The method according to statement 36, wherein screening for the presence of a homozygous mutation in the DWARF 11 gene comprises phenotypic screening.

[0065] 38. The method according to statement 37, wherein said phenotypic selection or screening comprises selection or screening based on plant grain size, grain shape, or grain weight.

[0066] 39. The method according to statement 37 or 38, wherein said phenotypic selection or screening comprises selection or screening based on plant height.

[0067] 40. The method according to any of statements 8 to 39, wherein said first plant and said second plant are the same.

[0068] 41. The method according to any of statements 8 to 39, wherein said first plant and said second plant are different.

[0069] 42. The method according to any of statements 34 to 41, wherein said method is a method for selecting and/or identifying a plant or plant part which is male sterile.

[0070] 43. The method according to any of statements 34 to 42, wherein said method is a method for selecting and/or identifying a plant or plant part which is genetic male sterile.

[0071] 44. The method according to any of statements 34 to 43, wherein said method is a method for selecting and/or identifying a dwarf plant or plant part which is male sterile.

[0072] 45. The method according to any of statements 34 to 44, wherein said method is a method for selecting and/or identifying a dwarf plant or plant part which is genetic male sterile.

[0073] 46. The method according to any of statements 1 to 45, wherein expression, activity, and/or stability of MYB80 and/or DWARF11 is reduced compared to a predetermined threshold.

[0074] 47. The method according to any of statements 1 to 46, wherein expression, activity, and/or stability of MYB80 and/or DWARF 11 is at least 50%, preferably at least 80%, more preferably at least 90% reduced compared to a predetermined threshold.

[0075] 48. The method according to statement 47, wherein said threshold is the expression level, activity, and/or stability in a plant or plant part lacking a mutation in the MYB80 gene and/or DWARF11 gene.

[0076] 49. The method according to any of statements 1 to 48, wherein said plant part is not propagation material.

[0077] 50. The method according to any of statements 1 to 48, wherein said plant part is a plant organ, tissue, or cell.

[0078] 51. The method according to statement 50, wherein said plant part is seed, pollen, oocyte, protoplast, inflorescence, embryo, or callus.

[0079] 52. The method according to any of statements 1 to 51, wherein said plant or plant part is mutagenized.

[0080] 53. The method according to any of statements 1 to 52, wherein said plant or plant part is transgenic or genome-edited.

[0081] 54. A plant or plant part generated, modified, identified, or selected according to the method of any of statements 1 to 53, or offspring thereof.

[0082] 55. A plant or plant part not expressing or having reduced expression, activity, and/or stability of MYB80 and DWARF11.

[0083] 56. The plant or plant part according to statement 55, comprising a mutation in the MYB80 gene and the DWARF11 gene (on the same chromosome).

[0084] 57. The plant or plant part according to statement 56, wherein (both) said mutation(s) is (are) heterozygous.

[0085] 58. The plant or plant part according to statement 56, wherein (both) said mutation(s) is (are) homozygous.

[0086] 59. The plant or plant part according to any of statements 56 to 58 wherein said mutation is a nonsense or missense mutation.

[0087] 60. The plant or plant part according to any of statements 56 to 59, wherein said mutation is a frameshift mutation.

[0088] 61. The plant or plant part according to any of statements 56 to 60, wherein said mutation is an indel mutation.

[0089] 62. The plant or plant part according to any of statements 56 to 61, wherein said mutation is a dominant (negative) mutation or a recessive mutation.

[0090] 63. The plant or plant part according to any of statements 56 to 62, wherein said mutation is a knock-out or knock-down mutation.

[0091] 64. The plant or plant part according to any of statements 56 to 63, wherein said mutation is in the coding sequence, a splicing signal, or a regulatory element.

[0092] 65. The plant or plant part according to any of statements 56 to 64, wherein said mutation is in the first exon.

[0093] 66. The plant or plant part according to any of statements 56 to 64, wherein said mutation is introduced by (random) mutagenesis, preferably TILLING.

[0094] 67. The plant or plant part according to any of statements 56 to 65, wherein said mutation is introduced by site-directed mutagenesis.

[0095] 68. The plant or plant part according to any of statements 56 to 67, wherein said mutation is introduced by gene-editing, preferably by CRISPR/Cas.

[0096] 69. The plant or plant part according to any of statements 55 to 68, wherein said plant or plant part which is male sterile.

[0097] 70. The plant or plant part according to any of statements 55 to 69, wherein said plant part is genetic male sterile.

[0098] 71. The plant or plant part according to any of statements 55 to 70, wherein said plant or plant part is from the family of Poaceae.

[0099] 72. The plant or plant part according to any of statements 55 to 71, wherein said plant or plant part is from the subfamily of Pooideae, Panicoideae, Chloridoideae, Pharoideae, Bambusoideae, or Oryzoideae.

[0100] 73. The plant or plant part according to any of statements 55 to 72, wherein said plant or plant part is from the genus Aegilops, Brachypodium, Cenchrus, Chasmanthium, Digitaria, Eleusine, Eragrostis, Hordeum, Leersia, Lolium, Miscanthus, Oropetium, Oryza, Panicum, Paspalum, Pharus, Phyllostachys, Saccharum, Secale, Setaria, Sorghum, Thinopyrum, Triticum, Urochloa, Avena, Poa, Phleum, Festuca, or Deschampsia.

[0101] 74. The plant or plant part according to any of statements 55 to 73, wherein said plant or plant part is selected from the species Aegilops tauschii, Brachypodium distachyon, Brachypodium mexicanum, Brachypodium stacei, Brachypodium sylvaticum, Cenchrus purpureus, Chasmanthium laxum, Digitaria exilis, Eleusine coracana, Eleusine coracana, Eragrostis curvula, Eragrostis tef, Hordeum vulgare, Leersia perrieri, Lolium perenne, Miscanthus sinensis, Oropetium thomaeum, Oryza alta, Oryza brachyantha, Oryza glaberrima, Oryza glumipatula, Oryza longistaminata, Oryza meridionalis, Oryza nivara, Oryza punctata, Oryza rufipogon, Oryza sativa Indica Group, Oryza sativa Japonica Group, Panicum hallii FIL2, Panicum hallii HAL2, Panicum virgatum, Paspalum vaginatum, Pharus latifolius, Phyllostachys edulis, Saccharum spontaneum, Secale cereale, Setaria italica, Setaria viridis, Sorghum bicolor, Thinopyrum intermedium, Triticum aestivum, Triticum dicoccoides, Triticum spelta, Triticum turgidum, or Urochloa fusca.

[0102] 75. The plant of plant part according to any of statements 55 to 74, wherein said plant or plant part is a crop plant or plant part.

[0103] 76. The plant or plant part according to any of statements 55 to 75, wherein said plant or plant part is a turf grass.

[0104] 77. The plant or plant part according to any of statements 55 to 76, wherein said MYB80 gene and said DWARF11 gene are located on the same chromosome.

[0105] 78. The plant or plant part according to any of statements 55 to 77 wherein said MYB80 gene and said DWARF11 gene are located on the same chromosomal arm.

[0106] 79. The plant or plant part according to any of statements 55 to 78 wherein the physical distance between said MYB80 gene and said DWARF11 gene in the genome of said plant or plant part is at most 1 Mb.

[0107] 80. The plant or plant part according to any of statements 55 to 79, wherein the genetic distance between said MYB80 gene and said DWARF11 gene in the genome of said plant or plant part is at most 1 cM.

[0108] 81. The plant or plant part according to any of statements 55 to 72, wherein said plant or plant part is not from the genus Zea.

[0109] 82. The plant or plant part according to any of statements 55 to 72, wherein said plant or plant part is not from the species Zea mays.

[0110] 83. The plant or plant part according to any of statements 55 to 72, wherein said plant or plant part is not from the species Triticum urartu.

[0111] 84. The plant or plant part according to any of statements 54 to 83, wherein said plant part is not propagation material.

[0112] 85. The plant or plant part according to any of statements 54 to 84, wherein said plant part is a plant organ, tissue, or cell.

[0113] 86. The plant or plant part according to statement 85, wherein said plant part is seed, pollen, oocyte, protoplast, inflorescence, embryo, or callus.

[0114] 87. The plant or plant part according to any of statements 55 to 86, which is mutagenized.

[0115] 88. The plant or plant part according to any of statements 55 to 86, which is transgenic or gene-edited.

[0116] 89. Use of a plant according to any of statements 54 to 88 for generating hybrid plants or plant parts.

[0117] 90. A method for generating hybrid plants or plant parts comprising crossing a first plant according to any of statements 54 to 88 with a second plant, and harvesting seeds.

[0118] 91. The method according to statement 90, wherein said first plant and said second plant are from the same genus.

[0119] 92. The method according to statement 90 or 91, wherein said first plant and said second plant are from the same species.

[0120] 93. A method for generating hybrid plants or plant parts comprising crossing a first plant having a homozygous mutation in MYB80 and in DWARF11 with a second plant, and harvesting seeds.

[0121] 94. The method according to statement 93, wherein said mutation is a nonsense or missense mutation.

[0122] 95. The method according to statement 93 or 94, wherein said mutation is a frameshift mutation.

[0123] 96. The method according to any of statements 93 to 95, wherein said mutation is an indel mutation.

[0124] 97. The method according to any of statements 93 to 96, wherein said mutation is a dominant (negative) mutation or a recessive mutation.

[0125] 98. The method according to any of statements 93 to 97, wherein said mutation is a knock-out or knock-down mutation.

[0126] 99. The method according to any of statements 93 to 98, wherein said mutation is in the coding sequence, a splicing signal or affecting a splice signal, or a regulatory element and/or in the first exon.

[0127] 100. The method according to any of statements 93 to 99, wherein said mutation is introduced by (random) mutagenesis, preferably TILLING.

[0128] 101. The method according to any of statements 93 to 100, wherein said mutation is introduced by site-directed mutagenesis, preferably, gene-editing, preferably by CRISPR/Cas.

[0129] 102. The method or plant (part) according to any of the previous statements, wherein the Dwarf11 gene, coding sequence, or protein as referred to herein has, comprises, consists (essentially) of, or is comprised in a sequence which is at least 80%, at least 85%, at least 90%, at least 95%, at least 96%), at least 97%, at least 98%, or at least 99% identical to as set forth in in any of SEQ ID NOs: 115, 116, 117, 118, 119, 120, 121, 122, 123, 124, 125, 126, 127, 128, 129, 130, 131, 132, 133, 134, 135, 136, 137, 138, 139, 140, 141, 142, 143, 144, 145, 146, 147, 148, 149, 150, 151, 162, 163, 164, 169, 170, 171, 175, 176, 177, 178, 179, 180, 181, 186, 187, 188, 189, 190, 191, 192, 193, 198, 199, 200, 201, 206, 207, 208, 209, 214, 215, 216, 217, 226, 227, 228, 229, 234, 235, 236, 237, 254, 255, 256, 257, 262, 263, 264, 265, 270, 271, 272, 273, 278, 279, 280, 281, 282, 283, 284, 289, 290, 291, 292, 297, 298, 299, 300, 305, 306, 307, 308, 309, 310, 311, 312, 313, 314, 315, 316, 317, 318, 319, 320, 321, 322, 335, 336, 337, 338, 339, 340, 341, 342, 343, 344, 345, 346, 347, 348, 349, 350, 351, 352, 353, 354, 355, 356, 357, 358, 359, 360, 361, 362, 363, 364, 365, 366, 367, 368, 369, 370, 371, 372, 377, 378, 379, 380, 385, 386, 387, or 388.

[0130] 103. The method or plant (part) according to any of the previous statements, wherein the Myb80 gene, coding sequence, or protein as referred to herein has, comprises, consists (essentially) of, or is comprised in a sequence which is at least 80%, at least 85%, at least 90%, at least 95%, at least 96%), at least 97%, at least 98%, or at least 99% identical to as set forth in in any of SEQ ID NOs: 152, 153, 154, 155, 156, 157, 158, 159, 160, 161, 165, 166, 167, 168, 172, 173, 174, 182, 183, 184, 185, 194, 195, 196, 197, 202, 203, 204, 205, 210, 211, 212, 213, 218, 219, 220, 221, 222, 223, 224, 225, 230, 231, 232, 233, 238, 239, 240, 241, 242, 243, 244, 245, 246, 247, 248, 249, 250, 251, 252, 253, 258, 259, 260, 261, 266, 267, 268, 269, 274, 275, 276, 277, 285, 286, 287, 288, 293, 294, 295, 296, 301, 302, 303, 304, 323, 324, 325, 326, 327, 328, 329, 330, 331, 332, 333, 334, 373, 374, 375, 376, 381, 382, 383, 384, 389, 390, 391, or 392.

[0131] 104. A method for developing an assay to (phenotypically) detect a (allele of a) gene of interest in a plant or plant part, comprising screening for the presence of genes located at most 1 Mb up- or downstream in the chromosome comprising said gene of interest, and selecting a gene causing or capable of causing a (allele-dependent) phenotype in a plant or plant part (as a proxy for (phenotypically) detecting said gene of interest).

[0132] 105. The method according to statement 104, wherein said gene of interest is a gene (at least one allele of which) causing male or female sterility, preferably genetic male or female sterility, preferably genetic male sterility.

[0133] 106. The method according to statement 104 or 105, wherein said phenotype is a morphological phenotype.

### DETAILED DESCRIPTION OF THE INVENTION

[0134] Before the present system and method of the invention are described, it is to be understood that this invention is not limited to particular systems and methods or combinations described, since such systems and methods and combinations may, of course, vary. It is also to be understood that the terminology used herein is not intended to be limiting, since the scope of the present invention will be limited only by the appended claims.

[0135] As used herein, the singular forms “a”, “an”, and “the” include both singular and plural referents unless the context clearly dictates otherwise.

[0136] The terms “comprising”, “comprises” and “comprised of” as used herein are synonymous with “including”, “includes” or “containing”, “contains”, and are inclusive or open-ended and do not exclude additional, non-recited members, elements or method steps. It will be appreciated that the terms “comprising”, “comprises” and “comprised of” as used herein comprise the terms “consisting of”, “consists” and “consists of”, as well as the terms “consisting essentially of”, “consists essentially” and “consists essentially of”.

[0137] The recitation of numerical ranges by endpoints includes all numbers and fractions subsumed within the respective ranges, as well as the recited endpoints.

[0138] The term “about” or “approximately” as used herein when referring to a measurable value such as a parameter, an amount, a temporal duration, and the like, is meant to encompass variations of +/−20% or less, preferably +/−10% or less, more preferably +/−5% or less, and still more preferably +/−1% or less of and from the specified value, insofar such variations are appropriate to perform in the disclosed invention. It is to be understood that the value to which the modifier “about” or “approximately” refers is itself also specifically, and preferably, disclosed.

[0139] Whereas the terms “one or more” or “at least one”, such as one or more or at least one member(s) of a group of members, is clear per se, by means of further exemplification, the term encompasses inter alia a reference to any one of said members, or to any two or more of said members, such as, e.g., any ≥3, ≥4, ≥5, ≥6 or ≥7 etc. of said members, and up to all said members.

[0140] All references cited in the present specification are hereby incorporated by reference in their entirety. In particular, the teachings of all references herein specifically referred to are incorporated by reference.

[0141] Unless otherwise defined, all terms used in disclosing the invention, including technical and scientific terms, have the meaning as commonly understood by one of ordinary skill in the art to which this invention belongs. By means of further guidance, term definitions are included to better appreciate the teaching of the present invention.

[0142] Standard reference works setting forth the general principles of recombinant DNA technology include Molecular Cloning: A Laboratory Manual, 2nd ed., vol. 1-3, ed. Sambrook et al., Cold Spring Harbor Laboratory Press, Cold Spring Harbor, N.Y., 1989; Current Protocols in Molecular Biology, ed. Ausubel et al., Greene Publishing and Wiley-Interscience, New York, 1992 (with periodic updates) (“Ausubel et al. 1992”); the series Methods in Enzymology (Academic Press, Inc.); Innis et al., PCR Protocols: A Guide to Methods and Applications, Academic Press: San Diego, 1990; PCR 2: A Practical Approach (M. J. MacPherson, B. D. Hames and G. R. Taylor eds. (1995); Harlow and Lane, eds. (1988) Antibodies, a Laboratory Manual; and Animal Cell Culture (R. I. Freshney, ed. (1987). General principles of microbiology are set forth, for example, in Davis, B. D. et al., Microbiology, 3rd edition, Harper & Row, publishers, Philadelphia, Pa. (1980).

[0143] In the following passages, different aspects of the invention are defined in more detail. Each aspect so defined may be combined with any other aspect or aspects unless clearly indicated to the contrary. In particular, any feature indicated as being preferred or advantageous may be combined with any other feature or features indicated as being preferred or advantageous.

[0144] Reference throughout this specification to “one embodiment” or “an embodiment” means that a particular feature, structure or characteristic described in connection with the embodiment is included in at least one embodiment of the present invention. Thus, appearances of the phrases “in one embodiment” or “in an embodiment” in various places throughout this specification are not necessarily all referring to the same embodiment, but may. Furthermore, the particular features, structures or characteristics may be combined in any suitable manner, as would be apparent to a person skilled in the art from this disclosure, in one or more embodiments. Furthermore, while some embodiments described herein include some but not other features included in other embodiments, combinations of features of different embodiments are meant to be within the scope of the invention, and form different embodiments, as would be understood by those in the art. For example, in the appended claims, any of the claimed embodiments can be used in any combination.

[0145] In the following detailed description of the invention, reference is made to the accompanying drawings that form a part hereof, and in which are shown by way of illustration only of specific embodiments in which the invention may be practiced. It is to be understood that other embodiments may be utilised, and structural or logical changes may be made without departing from the scope of the present invention. The following detailed description, therefore, is not to be taken in a limiting sense, and the scope of the present invention is defined by the appended claims.

[0146] Preferred statements (features) and embodiments of this invention are set herein below. Each statements and embodiments of the invention so defined may be combined with any other statement and/or embodiments unless clearly indicated to the contrary. In particular, any feature indicated as being preferred or advantageous may be combined with any other feature or features or statements indicated as being preferred or advantageous.

[0147] The term “plant” includes whole plants, including descendants or progeny thereof. As used herein unless clearly indicated otherwise, the term “plant” intends to mean a plant at any developmental stage. The term “plant part” includes any part or derivative of the plant, including particular plant tissues or structures, plant cells, plant protoplast, plant cell or tissue culture from which plants can be regenerated, plant calli, plant clumps and plant cells that are intact in plants or parts of plants, such as seeds, kernels, cobs, flowers, cotyledons, leaves, stems, buds, roots, root tips, stover, and the like. Plant parts may include processed plant parts or derivatives, including flower, oils, extracts etc. “Parts of a plant” are e.g. shoot vegetative organs/structures, e.g., leaves, stems and tubers; roots, flowers and floral organs/structures, e.g. bracts, sepals, petals, stamens, carpels, anthers and ovules; seed, including embryo, endosperm, and seed coat; fruit and the mature ovary; plant tissue, e.g. vascular tissue, ground tissue, and the like; and cells, e.g. guard cells, egg cells, pollen, trichomes and the like; and progeny of the same. Parts of plants may be attached to or separate from a whole intact plant. Such parts of a plant include, but are not limited to, organs, tissues, and cells of a plant, and preferably seeds. A “plant cell” is a structural and physiological unit of a plant, comprising a protoplast and a cell wall. The plant cell may be in form of an isolated single cell or a cultured cell, or as a part of higher organized unit such as, for example, plant tissue, a plant organ, or a whole plant. “Plant cell culture” means cultures of plant units such as, for example, protoplasts, cell culture cells, cells in plant tissues, pollen, pollen tubes, ovules, embryo sacs, zygotes and embryos at various stages of development. “Plant material” refers to leaves, stems, roots, flowers or flower parts, fruits, pollen, egg cells, zygotes, seeds, cuttings, cell or tissue cultures, or any other part or product of a plant. This also includes callus or callus tissue as well as extracts (such as extracts from taproots) or samples. A “plant organ” is a distinct and visibly structured and differentiated part of a plant such as a root, stem, leaf, flower bud, or embryo. “Plant tissue” as used herein means a group of plant cells organized into a structural and functional unit. Any tissue of a plant in planta or in culture is included. This term includes, but is not limited to, whole plants, plant organs, plant seeds, tissue culture and any groups of plant cells organized into structural and/or functional units. The use of this term in conjunction with, or in the absence of, any specific type of plant tissue as listed above or otherwise embraced by this definition is not intended to be exclusive of any other type of plant tissue. In certain embodiments, the plant part is a plant organ, tissue, or cell. In certain embodiments, the plant part is seed, pollen, oocyte, protoplast, inflorescence, embryo, or callus.

[0148] In certain embodiments, the plant part or derivative is (functional) propagation material, such as germplasm, a seed, or plant embryo or other material from which a plant can be regenerated. In certain embodiments, the plant part or derivative comprises (functional) male and/or female reproductive organs.

[0149] In certain embodiments, the plant part or derivative is not (functional) propagation material, such as germplasm, a seed, or plant embryo or other material from which a plant can be regenerated. In certain embodiments, the plant part or derivative does not comprise (functional) male and female reproductive organs. In certain embodiments, the plant part or derivative is or comprises propagation material, but propagation material which does not or cannot be used (anymore) to produce or generate new plants, such as propagation material which have been chemically, mechanically or otherwise rendered non-functional, for instance by heat treatment, acid treatment, compaction, crushing, chopping, etc.

[0150] As used herein unless clearly indicated otherwise, the term “plant” intended to mean a plant at any developmental stage.

[0151] In certain embodiments, the plant is a crop plant, such as a cash crop, fodder crop, or subsistence crop, such as food or non-food crops, including agriculture, horticulture, floriculture, or industrial crops. The term crop plant has its ordinary meaning as known in the art. By means of further guidance, and without limitation, a crop plant is a plant grown by humans for human or animal food and other resources, and can be grown and harvested extensively for profit or subsistence, typically in an agricultural setting or context. In certain embodiments, the plant or plant part is from a crop plant of the Poaceae family, or of the Pooideae, Panicoideae, Chloridoideae, Pharoideae, Bambusoideae, or Oryzoideae subfamily. In certain embodiments, the plant is a turf grass.

[0152] As used herein, the term Poaceae refers to the family of grasses, or Gramineae. Preferably, the Poaceae are cereals (or cereal grasses), which are in particular cultivated for the edible components of its grain, fodder grasses, or turf grasses. In certain embodiments, the plants or plant parts are from the family of Poaceae. In certain embodiments, the plants or plant parts are from the subfamily of Pooideae. In certain embodiments, the plants or plant parts are from the subfamily of Panicoideae. In certain embodiments, the plants or plant parts are from the subfamily of Oryzoideae. In certain embodiments, the plants or plant parts are from the subfamily of Chloridoideae. In certain embodiments, the plants or plant parts are from the subfamily of Pharoideae. In certain embodiments, the plants or plant parts are from the subfamily of Bambusoideae.

[0153] As used herein, the term “plant (part) population” may be used interchangeably with population of plants or plant parts. A plant (part) population preferably comprises a multitude of individual plants (or plant parts thereof), such as preferably at least 10, such as 20, 30, 40, 50, 60, 70, 80, or 90, more preferably at least 100, such as 200, 300, 400, 500, 600, 700, 800, or 900, even more preferably at least 1000, such as at least 10000 or at least 100000.

[0154] In certain embodiments, the plant population (or plant parts thereof) is a plant line, strain, or variety. In certain embodiments, the plant population (or plant parts thereof) is not a plant line, strain, or variety. In certain embodiments, the plant population (or plant parts thereof) is an inbred plant line, strain, or variety. In certain embodiments, the plant population (or plant parts thereof) is not an inbred plant line, strain, or variety. In certain embodiments, the plant population (or plant parts thereof) is an outbred plant line, strain, or variety. In certain embodiments, the plant population (or plant parts thereof) is not an outbred plant line, strain, or variety.

[0155] As used herein, the terms “progeny” and “progeny plant” refer to a plant generated from vegetative or sexual reproduction from one or more parent plants. A progeny plant can be obtained by cloning or selfing a single parent plant, or by crossing two or more parental plants. For instance, a progeny plant can be obtained by cloning or selfing of a parent plant or by crossing two parental plants and include selfings as well as the F1 or F2 or still further generations. An F1 is a first-generation progeny produced from parents at least one of which is used for the first time as donor of a trait, while progeny of second generation (F2) or subsequent generations (F3, F4, and the like) are specimens produced from selfings, intercrosses, backcrosses, and/or other crosses of F1 s, F2 s, and the like. An F1 can thus be (and in some embodiments is) a hybrid resulting from a cross between two true breeding parents (i.e., parents that are true-breeding are each homozygous for a trait of interest or an allele thereof), while an F2 can be (and in some embodiments is) a progeny resulting from self-pollination of the F1 hybrids. The term “progeny” can in certain embodiments be used interchangeably with “offspring”, in particular when the plant or plant material is derived from sexual crossing of parent plants.

[0156] Preferably, in crosses between a first plant and a second plant, both plants are from the same genus, preferably from the same species. However, interspecies crosses are also possible.

[0157] The term “locus” (loci plural) means a specific place or places or a site on a chromosome where for example a QTL, a gene or genetic marker is found. As used herein, the term “quantitative trait locus” or “QTL” has its ordinary meaning known in the art. By means of further guidance, and without limitation, a QTL may refer to a region of DNA that is associated with the differential expression of a quantitative phenotypic trait in at least one genetic background, e.g., in at least one breeding population. The region of the QTL encompasses or is closely linked to the gene or genes that affect the trait in question.

[0158] An “allele of a QTL” can comprise multiple genes or other genetic factors within a contiguous genomic region or linkage group, such as a haplotype. An allele of a QTL can denote a haplotype within a specified window wherein said window is a contiguous genomic region that can be defined, and tracked, with a set of one or more polymorphic markers. A haplotype can be defined by the unique fingerprint of alleles at each marker within the specified window. A QTL may encode for one or more alleles that affect the expressivity of a continuously distributed (quantitative) phenotype. In certain embodiments, the QTL as described herein may be homozygous. In certain embodiments, the QTL as described herein may be heterozygous.

[0159] As used herein, the term “allele” or “alleles” refers to one or more alternative forms, i.e. different nucleotides or nucleotide sequences, of a locus, such as a gene, marker, QTL, etc.

[0160] As used herein, the term “mutant alleles” or “mutation” of alleles include alleles having one or more mutations, such as insertions, deletions, stop codons, base changes (e.g., transitions or transversions), or alterations in splice junctions, which may or may not give rise to altered gene products. Modifications in alleles may arise in coding or non-coding regions (e.g. promoter regions, exons, introns or splice junctions).

[0161] The term “mutation” or “mutated” as used herein refers to a gene or protein product thereof which is altered or modified such that the function normally attributed to the gene or protein product thereof is altered, or alternatively such that the expression, stability, and/or activity normally associated with the gene or protein product thereof is altered. Typically, a mutation as referred to herein results in a phenotypic effect, such as male sterility or dwarfism, as described herein elsewhere. It will be understood that a mutation in a gene or protein product thereof is referred to in comparison with a gene or protein product thereof not having such mutation, such as a wild type or endogenous gene or protein product thereof. Typically, a mutation refers to a modification at the DNA level, and includes changes in the genetics and/or epigenetics. An alteration in the genetics may include an insertion, a deletion, an introduction of a stop codon, a base change (e.g. transition or transversion), or an alteration in splice junctions. These alterations may arise in coding or non-coding regions (e.g. promoter regions, exons, introns or splice junctions) of the endogenous DNA sequence. For example, an alteration in the genetics may be the exchange (including insertions, deletions) of at least one nucleotide in the endogenous DNA sequence or in a regulatory sequence of the endogenous DNA sequence. If such a nucleotide exchange takes place in a promoter, for example, this may lead to an altered activity of the promoter, since, for example, cis-regulator elements are modified such that the affinity of a transcription factor to the mutated cis-regulatory elements is altered in comparison to the wild-type promoter, so that the activity of the promoter with the mutated cis-regulatory elements is increased or reduced, depending upon whether the transcription factor is a repressor or inductor, or whether the affinity of the transcription factor to the mutated cis-regulatory elements is intensified or weakened. If such a nucleotide exchange occurs, e.g., in a coding region of the endogenous DNA sequence, this may lead to an amino acid exchange in the encoded protein, which may produce an alteration in the activity or stability of the protein, in comparison to the wild-type protein. An alteration in the epigenetics may take place via an altered methylation pattern of the DNA. In certain embodiments, a mutation as referred to herein relates to the insertion of one or more nucleotides in a gene. In certain embodiments, a mutation as referred to herein relates to the deletion of one or more nucleotides in a gene. In certain embodiments, the mutation as referred to herein relates to the deletion as well as the insertion of one or more nucleotides. In certain embodiments, certain nucleotide stretches, such as for instance encoding a particular protein domain are deleted. In certain embodiments, certain nucleotide stretches, such as for instance encoding a particular protein domain are deleted and replaced by nucleotide sequences encoding a different protein domain. In certain embodiments, a mutation as referred to herein relates to the exchange of one or more nucleotides in a gene by different nucleotides. In certain embodiments, the mutation is a nonsense mutation (i.e. the mutation results in the generation of a stop codon in a protein encoding sequence). In certain embodiments, the mutation is a frameshift mutation (i.e. an insertion or deletion of one or more nucleotides (not equal to three or a product thereof) in a protein encoding sequence). In certain embodiments, the mutation results in a truncated protein product. In certain embodiments, the mutation results in an N-terminally truncated protein product. In certain embodiments, the mutation results in a C-terminally truncated protein product. In certain embodiments, the mutation results in an N-terminally and C-terminally truncated protein product. In certain embodiments, the mutation results in an altered splice site (such as an altered splice donor and/or splice acceptor site). In certain embodiments, the mutation is in an exon. In certain embodiments, the mutation is in an intron. In certain embodiments, the mutation is in a regulatory sequence, such as a promoter. In certain embodiments, the mutation results in a codon encoding a different amino acid. In certain embodiments, the mutation results in the insertion or deletion of one or more codons (i.e. nucleotide triplets). In certain embodiments, the mutation results in gene deletion. In certain embodiments, the mutation is a knockout mutation. Both frameshift and nonsense mutations can in certain embodiments be considered as knockout mutations, in particular if the mutation is present in an early exon. A knockout mutation (or loss of function mutation) as used herein preferably means that a functional gene product, such as a functional protein, is not produced anymore. In particular, frameshift and nonsense mutations will lead to premature termination of protein translation, such that a truncated protein will result, which often lacks the required stability and/or activity to perform the function naturally attributed to it. In certain embodiments, the mutation is a knockdown mutation. Knockout mutations often, and according to the present invention preferably are recessive. In contrast to a knockout mutation, a knockdown mutation results in a decreased activity, stability, and/or expression (rate) of the native functional gene product, such as a protein, and thereby ultimately in a decreased functionality. For instance, mutations in promoter regions affecting transcriptional activator binding (or other regulatory sequences), in particular reducing transcription rate, can be considered knockdown mutations. Also mutations negatively affecting protein stability (such as to increase ubiquitination and subsequent protein degradation) can be considered knockdown mutations). In addition, mutations negatively affecting protein activity (such as binding strength or enzymatic activity) can be considered knockdown mutations. While mutation described herein may be non-naturally occurring, this need not necessarily be the case. In certain embodiments, the term “mutated Myb80 protein” or “mutated Dwarf11 protein” can be used interchangeably respectively with “male sterility (Myb80) protein” or “dwarfism (Dwarf11) protein” or the like. As used herein, a mutated Myb80 or Dwarf11 protein, gene, allele, or coding sequence (i.e. polynucleic acid encoding for instance a protein) can be used interchangeably with a protein, gene, allele, or coding sequence conferring respectively (genetic) male sterility or dwarfism, as described herein elsewhere. It will be understood that preferably, the mutation as described herein, such as the Myb80 mutation or the Dwarf11 mutation, results in the expression, activity, and/or stability of the gene product (i.e. mRNA and/or protein) being absent or reduced, as described herein elsewhere. It will be further understood that depending of the zygosity of the mutated gene, a phenotypic effect may or may not occur. As is known in the art, recessive mutations only result in a phenotype if present homozygously, as may for instance be the case for the Myb80 and Dwarf11 mutations as described herein. Accordingly, reference herein to a mutation leading to absent or reduced expression, activity, and/or stability of a gene product may relate to expression, activity, and/or stability resulting from a single allele. A phenotypic effect may arise in a heterozygous state (in case of a dominant allele) or may only arise in a homozygous state (in case of a recessive allele). In case of the Myb80 and Dwarf11 genes (or any other gene pair having recessive mutations), reference to a mutation causing genetic male sterility and dwarfism respectively, indicates that such phenotypes manifest only in case the mutation is homozygous, notwithstanding being referred to as “dwarfism causing mutation” or “genetic male sterility causing mutation”. Such references indicate the capacity to result in dwarfism or genetic male sterility in a homozygous state.

[0162] In certain embodiments, the mutation as referred to herein is homozygous. In certain embodiments, the mutation as referred to herein is heterozygous. In certain embodiments, the mutation of both genes in the gene pair as referred to herein is homozygous. In certain embodiments, the mutation of both genes in the gene pair as referred to herein is heterozygous. In certain embodiments, the Myb80 mutation as referred to herein is homozygous. In certain embodiments, the Myb80 mutation as referred to herein is heterozygous. In certain embodiments, the Dwarf11 mutation as referred to herein is homozygous. In certain embodiments, the Dwarf11 mutation as referred to herein is heterozygous. In certain embodiments, the Myb80 and Dwarf11 mutation as referred to herein is homozygous. In certain embodiments, the Myb80 and Dwarf11 mutation as referred to herein is heterozygous.

[0163] Preferably, as used herein, a mutation in a gene includes mutations in regulatory sequences of such gene, such as in particular the promoter. Mutations in promoter sequences in particular, and preferably according to the present invention, may alter, disturb, attenuate, reduce, or eliminate transcription.

[0164] In certain embodiments, a wild type/endogenous allele is replaced by a mutated allele, preferably all wild type/endogenous alleles are replaced by a mutated allele. Replacement can be effected by any means known in the art, as also described herein elsewhere. Replacement, as used herein also includes (direct) mutagenesis of the wild type/endogenous allele(s) at its native genomic locus. Accordingly, in certain embodiments, a wild type/endogenous allele is mutated, as described herein elsewhere, optionally all wild type/endogenous alleles are mutated. The skilled person will understand that only one copy of a wild type/endogenous allele may be mutated and that homozygosity (if so desired) may be obtained by selfing and subsequent selection. In certain embodiments, a reduced number of wild type/endogenous alleles is present (i.e. the wild type/endogenous allele is heterozygous).

[0165] According to the invention, mutations as described herein may be constitutive or conditional or inducible, and/or may be (multiple or single) tissue, organ, or cell (type) specific. The skilled person has ample knowledge how to implement such (differential) mutagenesis.

[0166] As used herein, “reducing the expression (rate)” or “reduction in the expression (rate)” or “suppression of the expression” “reduced expression (rate)” or “repression” or a comparable phrase in certain embodiments means a reduction in the expression level or rate of a nucleotide or protein sequence by more than 10%, 15%, 20%, 25% or 30%, preferably by more than 40%, 45%, 50%, 55%, 60% or 65%, more preferably by more than 70%, 75%, 80%, 85%, 90%, 92%, 94%, 96% or 98% in comparison to the specified reference or threshold, such as a plant not comprising the genetic or phenotypic or otherwise modifications according to the invention as described herein elsewhere, or a reference plant (e.g. a genetic male fertile plant or a plant not having dwarfism). However, it may also mean that the expression (rate) of a nucleotide sequence or protein is reduced by 100%. The reduction in the expression (rate) preferably leads to a change of the phenotype of a plant in which the expression (rate) is reduced. In the context of the present invention, an altered phenotype may be genetic male sterility in the case of Myb80 or dwarfism in case of Dwarf11.

[0167] “Reduction in the transcription rate” or “reduced transcription rate” or a comparable phrase in certain embodiments means a reduction in the transcription rate of a nucleotide sequence by more than 10%, 15%, 20%, 25% or 30%, preferably by more than 40%, 45%, 50%, 55%, 60% or 65%, more preferably by more than 70%, 75%, 80%, 85%, 90%, 92%, 94%, 96% or 98% in comparison to the specified reference or threshold, such as a plant not comprising the genetic or phenotypic or otherwise modifications according to the invention as described herein elsewhere, or a reference plant. However, it may also mean that the transcription rate of a nucleotide sequence is reduced by 100%. The reduction in the transcription rate preferably leads to a change of the phenotype of a plant in which the transcription rate is reduced. In the context of the present invention, an altered phenotype may be genetic male sterility in the case of Myb80 or dwarfism in case of Dwarf11.

[0168] As used herein, “reduced (protein) activity” refers to reduced activity of about at least 10%, preferably at least 30%, more preferably at least 50%, such as at least 20%, 40%, 60%, 80% or more, such as at least 85%, at least 90%, at least 95%, or more. Activity is (substantially) absent or eliminated if activity is reduced at least 80%, preferably at least 90%, more preferably at least 95%. In certain embodiments, activity is (substantially) absent, if no activity, in particular the wild type or native protein activity, can be detected. (Protein) activity levels can be determined by any means known in the art, depending on the type of protein, such as by standard detection methods, including for instance enzymatic assays (for enzymes), transcription assays (for transcription factors), assays to analyse a phenotypic output, etc. Activity may be compared to a reference or threshold as defined above.

[0169] As used herein, “reduced stability” may refer to reduced protein stability or reduced RNA, such as mRNA stability. Stability of proteins or RNA can be determined by means known in the art, such as determination of protein/RNA half-life. Reduced protein or RNA stability in certain embodiments means a reduction of stability of about at least 10%, preferably at least 30%, more preferably at least 50%, such as at least 20%, 40%, 60%, 80% or more, such as at least 85%, at least 90%, or at least 95. Stability may be compared to a reference or threshold as defined above.

[0170] The skilled person will understand that a reduction in expression, transcription, activity, and/or stability is evaluated compared to a reference, as indicated above, in a comparable context, preferably in the same context, such as a particular developmental stage and/or a particular organ, tissue, or cell type.

[0171] As used herein, the terms “not expressing” or “lacking expression” (and mutatis mutandis for instance “lacking activity”) refer to plants or plant part not capable of expression, e.g. by knockout mutations or gene deletions and the like. It will be understood that such absence of expression refers to expression in cells, tissues, or organs in which otherwise (i.e. in case no mutation is present) expression would occur.

[0172] It will be understood that reduced or absent expression, activity, and/or stability refers to expression, activity, and/or stability of the wild type, functional, or full length gene product. The skilled person will understand that not every polymorphism will result in a phenotypic change. In such case, even a gene (allele) comprising such polymorphisms may still be considered wild type, functional, or full length. It will be understood that reduced or absent expression, activity, and/or stability results in or is capable of resulting in a phenotype (such as dwarfism or genetic male sterility), even if recessive, and hence only present if the mutation(s) is (are) homozygous.

[0173] Mutations as described herein may be introduced by mutagenesis, which may be performed in accordance with any of the techniques known in the art. As used herein, “mutagenization” or “mutagenesis” includes both conventional mutagenesis and location-specific mutagenesis or “genome editing” or “gene editing”. In conventional mutagenesis, modification at the DNA level is not produced in a targeted manner. The plant cell or the plant is exposed to mutagenic conditions, such as TILLING, via UV light exposure or the use of chemical substances (Till et al., 2004). An additional method of random mutagenesis is mutagenesis with the aid of a transposon. Location-specific mutagenesis enables the introduction of modification at the DNA level in a target-oriented manner at predefined locations in the DNA. For example, TALENS, meganucleases, homing endonucleases, zinc finger nucleases, or a CRISPR/Cas system as further described herein may be used for this.

[0174] In certain embodiments, a wild type/endogenous allele is knocked out, optionally all wild type/endogenous alleles are knocked out, and a mutated allele is transgenically introduced, transiently or genomically integrated, preferably genomically integrated. In certain embodiments, a wild type/endogenous allele is knocked out, optionally all wild type/endogenous alleles are knocked out, and is transgenically replaced by a mutated allele (at the native genomic location of the wild type allele). The skilled person will understand that only one copy of a wild type/endogenous allele may be knocked out and that homozygosity (if so desired) may be obtained by selfing and subsequent selection.

[0175] In certain embodiments, the mutations as described herein, such as the Myb80 mutations or the Dwarf11 mutations, are or result in amino acid substitutions (compared to the wild type or unmutated protein, gene, or coding sequence). In certain embodiments, the mutation is a point mutation. Preferably, the mutation is a missense mutation (i.e. the mutation results in a codon encoding a different amino acid). In certain embodiments one or more mutations are present. In certain embodiments, from 1 to 10 mutations are present. In certain embodiments, from 1 to 9 mutations are present. In certain embodiments, from 1 to 8 mutations are present. In certain embodiments, from 1 to 7 mutations are present. In certain embodiments, from 1 to 6 mutations are present. In certain embodiments, from 1 to 5 mutations are present. In certain embodiments, from 1 to 4 mutations are present. In certain embodiments, from 1 to 3 mutations are present. In certain embodiments, from 1 to 2 mutations are present. In certain embodiments, 1 mutation is present. In certain embodiments, from 1 to 10 amino acid substitutions are present in the mutated protein. In certain embodiments, from 1 to 9 amino acid substitutions are present in the mutated protein. In certain embodiments, from 1 to 8 amino acid substitutions are present in the mutated protein. In certain embodiments, from 1 to 7 amino acid substitutions are present in the mutated protein. In certain embodiments, from 1 to 6 amino acid substitutions are present in the mutated protein. In certain embodiments, from 1 to 5 amino acid substitutions are present in the mutated protein. In certain embodiments, from 1 to 4 amino acid substitutions are present in the mutated protein. In certain embodiments, from 1 to 3 amino acid substitutions are present in the mutated protein. In certain embodiments, from 1 to 2 amino acid substitutions are present in the mutated protein. In certain embodiments, 1 amino acid substitution is present in the mutated protein. In certain embodiments, from 1 to 10 point mutations, preferably missense mutations, are present in the mutated gene, allele, or coding sequence. In certain embodiments, from 1 to 9 point mutations, preferably missense mutations, are present in the mutated gene, allele, or coding sequence. In certain embodiments, from 1 to 8 point mutations, preferably missense mutations, are present in the mutated gene, allele, or coding sequence. In certain embodiments, from 1 to 7 point mutations, preferably missense mutations, are present in the mutated gene, allele, or coding sequence. In certain embodiments, from 1 to 6 point mutations, preferably missense mutations, are present in the mutated gene, allele, or coding sequence. In certain embodiments, from 1 to 5 point mutations, preferably missense mutations, are present in the mutated gene, allele, or coding sequence. In certain embodiments, from 1 to 4 point mutations, preferably missense mutations, are present in the mutated gene, allele, or coding sequence. In certain embodiments, from 1 to 3 point mutations, preferably missense mutations, are present in the mutated gene, allele, or coding sequence. In certain embodiments, from 1 to 2 point mutations, preferably missense mutations, are present in the mutated gene, allele, or coding sequence. In certain embodiments, 1 point mutation, preferably missense mutation, is present in the mutated gene, allele, or coding sequence.

[0176] As used herein, the terms “introgression”, “introgressed” and “introgressing” refer to both a natural and artificial process whereby chromosomal fragments or genes of one species, variety or cultivar are moved into the genome of another species, variety or cultivar, by crossing those species. The process may optionally be completed by backcrossing to the recurrent parent. For example, introgression of a desired allele at a specified locus can be transmitted to at least one progeny via a sexual cross between two parents of the same species, where at least one of the parents has the desired allele in its genome. Alternatively, for example, transmission of an allele can occur by recombination between two donor genomes, e.g., in a fused protoplast, where at least one of the donor protoplasts has the desired allele in its genome. The desired allele can be, e.g., detected by a marker that is associated with a phenotype, at a QTL, a transgene, or the like. In any case, offspring comprising the desired allele can be repeatedly backcrossed to a line having a desired genetic background and selected for the desired allele, to result in the allele becoming fixed in a selected genetic background. The process of “introgressing” is often referred to as “backcrossing” when the process is repeated two or more times. “Introgression fragment” or “introgression segment” or “introgression region” refers to a chromosome fragment (or chromosome part or region) which has been introduced into another plant of the same or related species either artificially or naturally such as by crossing or traditional breeding techniques, such as backcrossing, i.e. the introgressed fragment is the result of breeding methods referred to by the verb “to introgress” (such as backcrossing). It is understood that the term “introgression fragment” never includes a whole chromosome, but only a part of a chromosome. The introgression fragment can be large, e.g. even three quarter or half of a chromosome, but is preferably smaller, such as about 15 Mb or less, such as about 10 Mb or less, about 9 Mb or less, about 8 Mb or less, about 7 Mb or less, about 6 Mb or less, about 5 Mb or less, about 4 Mb or less, about 3 Mb or less, about 2.5 Mb or 2 Mb or less, about 1 Mb (equals 1,000,000 base pairs) or less, or about 0.5 Mb (equals 500,000 base pairs) or less, such as about 200,000 bp (equals 200 kilo base pairs) or less, about 100,000 bp (100 kb) or less, about 50,000 bp (50 kb) or less, about 25,000 bp (25 kb) or less.

[0177] A genetic element, an introgression fragment, a QTL or a gene or allele conferring a trait is said to be “obtainable from” or can be “obtained from” or “derivable from” or can be “derived from” or “as present in” or “as found in” a plant or plant part as described herein elsewhere if it can be transferred from the plant in which it is present into another plant in which it is not present (such as a line or variety) using traditional breeding techniques without resulting in a phenotypic change of the recipient plant apart from the addition of the trait conferred by the genetic element, locus, introgression fragment, gene or allele. The terms are used interchangeably and the genetic element, locus, introgression fragment, gene or allele can thus be transferred into any other genetic background lacking the trait. Not only plants comprising the genetic element, locus, introgression fragment, gene or allele can be used, but also progeny/descendants from such plants which have been selected to retain the genetic element, locus, introgression fragment, gene or allele, can be used and are encompassed herein. Whether a plant (or genomic DNA, cell or tissue of a plant) comprises the same genetic element, locus, introgression fragment, gene or allele as obtainable from such plant can be determined by the skilled person using one or more techniques known in the art, such as phenotypic assays, whole genome sequencing, molecular marker analysis, trait mapping, chromosome painting, allelism tests and the like, or combinations of techniques. It will be understood that transgenic plants may also be encompassed.

[0178] “Introducing” in the meaning of the present invention includes stable or transient integration by means of transformation including Agrobacterium-mediated transformation, transfection, microinjection, biolistic bombardment, insertion using gene editing technology like CRISPR systems (e.g. CRISPR/Cas, in particular CRISPR/Cas9 or CRISPR/Cas12), CRISPR/CasX, or CRISPR/CasY), TALENs, zinc finger nucleases or meganucleases, homologous recombination optionally by means of one of the below mentioned gene editing technology including preferably a repair template, modification of endogenous gene using random or targeted mutagenesis like TILLING or above mentioned gene editing technology, etc.

[0179] As used herein the terms “genetic engineering”, “transformation” and “genetic modification” are all used herein as synonyms for the transfer of isolated and cloned genes into the DNA, usually the chromosomal DNA or genome, of another organism.

[0180] “Transgenic” or “genetically modified organisms” (GMOs) as used herein are organisms whose genetic material has been altered using techniques generally known as “recombinant DNA technology”. Recombinant DNA technology encompasses the ability to combine DNA molecules from different sources into one molecule ex vivo (e.g. in a test tube). The term “transgenic” here means genetically modified by the introduction of a non-endogenous nucleic acid sequence. Typically a species-specific nucleic acid sequence is introduced in a form, arrangement or quantity into the cell in a location where the nucleic acid sequence does not occur naturally in the cell. This terminology generally does not cover organisms whose genetic composition has been altered by conventional cross-breeding or by “mutagenesis” breeding, as these methods predate the discovery of recombinant DNA techniques. “Non-transgenic” as used herein refers to plants and food products derived from plants that are not “transgenic” or “genetically modified organisms” as defined above.

[0181] “Transgene”, “exogene”, or “chimeric gene” refers to a genetic locus comprising a DNA sequence, such as a recombinant gene, which has been introduced into the genome of a plant by transformation, such as Agrobacterium mediated transformation. A plant comprising a transgene stably integrated into its genome is referred to as “transgenic plant”.

[0182] “Gene editing” or “genome editing” refers to genetic engineering in which DNA or RNA is inserted, deleted, modified or replaced in the genome of a living organism. Gene editing may comprise targeted or non-targeted (random) mutagenesis. Targeted mutagenesis may be accomplished for instance with designer nucleases, such as for instance with meganucleases, zinc finger nucleases (ZFNs), transcription activator-like effector-based nucleases (TALEN), and the clustered regularly interspaced short palindromic repeats (CRISPR/Cas) system. These nucleases create site-specific double-strand breaks (DSBs) at desired locations in the genome. The induced double-strand breaks are repaired through nonhomologous end-joining (NHEJ) or homologous recombination (HR), resulting in targeted mutations or nucleic acid modifications. The use of designer nucleases is particularly suitable for generating gene knockouts or knockdowns. In certain embodiments, designer nucleases are developed which specifically induce a mutation in for instance the Myb80 and/or Dwarf11 gene, as described herein elsewhere, such as to generate a mutation or a knockout of the gene. Alternatively, by means of for instance RNA-specific CRISPR/Cas systems, a knockdown can be achieved, as RNA/specific CRISPR/Cas systems (such as Cas13) allow site-directed cleavage of (single-stranded) RNA. Accordingly, in certain embodiments, designer nucleases, in particular RNA-specific CRISPR/Cas systems are developed which specifically target the mRNA, such as to cleave mRNA and generate a knockdown of the gene/mRNA/protein. Delivery and expression systems of designer nuclease systems are well known in the art.

[0183] In certain embodiments, the nuclease or targeted/site-specific/homing nuclease is, comprises, consists essentially of, or consists of a (modified) CRISPR/Cas system or complex, a (modified) Cas protein, a (modified) zinc finger, a (modified) zinc finger nuclease (ZFN), a (modified) transcription factor-like effector (TALE), a (modified) transcription factor-like effector nuclease (TALEN), or a (modified) meganuclease. In certain embodiments, said (modified) nuclease or targeted/site-specific/homing nuclease is, comprises, consists essentially of, or consists of a (modified) RNA-guided nuclease. It will be understood that in certain embodiments, the nucleases may be codon optimized for expression in plants. As used herein, the term “targeting” of a selected nucleic acid sequence means that a nuclease or nuclease complex is acting in a nucleotide sequence specific manner. For instance, in the context of the CRISPR/Cas system, the guide RNA is capable of hybridizing with a selected nucleic acid sequence. As uses herein, “hybridization” or “hybridizing” refers to a reaction in which one or more polynucleotides react to form a complex that is stabilized via hydrogen bonding between the bases of the nucleotide residues, i.e. a process in which a single-stranded nucleic acid molecule attaches itself to a complementary nucleic acid strand, i.e. agrees with this base pairing. Standard procedures for hybridization are described, for example, in Sambrook et al. (Molecular Cloning. A Laboratory Manual, Cold Spring Harbor Laboratory Press, 3rd edition 2001). The hydrogen bonding may occur by Watson Crick base pairing, Hoogstein binding, or in any other sequence specific manner. The complex may comprise two strands forming a duplex structure, three or more strands forming a multi stranded complex, a single self-hybridizing strand, or any combination of these. A hybridization reaction may constitute a step in a more extensive process, such as the initiation of PGR, or the cleavage of a polynucleotide by an enzyme. A sequence capable of hybridizing with a given sequence is referred to as the “complement” of the given sequence. Preferably this will be understood to mean an at least 50%, more preferably at least 55%, 60%, 65%, 70%, 75%, 80% or 85%, more preferably 90%, 91%, 92%, 93%, 94%, 95%, 96%, 97%, 98% or 99% of the bases of the nucleic acid strand form base pairs with the complementary nucleic acid strand. The possibility of such binding depends on the stringency of the hybridization conditions.

[0184] Gene editing may involve transient, inducible, or constitutive expression of the gene editing components or systems. Gene editing may involve genomic integration or episomal presence of the gene editing components or systems. Gene editing components or systems may be provided on vectors, such as plasmids, which may be delivered by appropriate delivery vehicles, as is known in the art. Preferred vectors are expression vectors.

[0185] Gene editing may comprise the provision of recombination templates, to effect homology directed repair (HDR). For instance a genetic element may be replaced by gene editing in which a recombination template is provided. The DNA may be cut upstream and downstream of a sequence which needs to be replaced. As such, the sequence to be replaced is excised from the DNA. Through HDR, the excised sequence is then replaced by the template. In certain embodiments, the QTL allele of the invention as described herein may be provided on/as a template. By designing the system such that double strand breaks are introduced upstream and downstream of the corresponding region in the genome of a plant, this region is excised and can be replaced with the template comprising a mutated gene of the invention. In this way, introduction of the mutated gene (allele) of the invention in a plant need not involve multiple backcrossing, in particular in a plant of specific genetic background. Similarly, the polynucleic acid of the invention may be provided on/as a template. More advantageously however, the polynucleic acid of the invention may be generated without the use of a recombination template, but solely through the endonuclease action leading to a double strand DNA break which is repaired by NHEJ, resulting in the generation of indels.

[0186] In certain embodiments, the nucleic acid modification or mutation is effected by a (modified) transcription activator-like effector nuclease (TALEN) system. Transcription activator-like effectors (TALEs) can be engineered to bind practically any desired DNA sequence. Exemplary methods of genome editing using the TALEN system can be found for example in Cermak T. Doyle E L. Christian M. Wang L. Zhang Y. Schmidt C, et al. Efficient design and assembly of custom TALEN and other TAL effector-based constructs for DNA targeting. Nucleic Acids Res. 2011; 39: e82; Zhang F. Cong L. Lodato S. Kosuri S. Church GM. Arlotta P Efficient construction of sequence-specific TAL effectors for modulating mammalian transcription. Nat Biotechnol. 2011; 29:149-153 and U.S. Pat. Nos. 8,450,471, 8,440,431 and 8,440,432, all of which are specifically incorporated by reference. By means of further guidance, and without limitation, naturally occurring TALEs or “wild type TALEs” are nucleic acid binding proteins secreted by numerous species of proteobacteria. TALE polypeptides contain a nucleic acid binding domain composed of tandem repeats of highly conserved monomer polypeptides that are predominantly 33, 34 or 35 amino acids in length and that differ from each other mainly in amino acid positions 12 and 13. In advantageous embodiments the nucleic acid is DNA. As used herein, the term “polypeptide monomers”, or “TALE monomers” will be used to refer to the highly conserved repetitive polypeptide sequences within the TALE nucleic acid binding domain and the term “repeat variable di-residues” or “RVD” will be used to refer to the highly variable amino acids at positions 12 and 13 of the polypeptide monomers. As provided throughout the disclosure, the amino acid residues of the RVD are depicted using the IUPAC single letter code for amino acids. A general representation of a TALE monomer which is comprised within the DNA binding domain is X1-11-(X12X13)-X14-33 or 34 or 35, where the subscript indicates the amino acid position and X represents any amino acid. X12X13 indicate the RVDs. In some polypeptide monomers, the variable amino acid at position 13 is missing or absent and in such polypeptide monomers, the RVD consists of a single amino acid. In such cases the RVD may be alternatively represented as X*, where X represents X12 and (*) indicates that X13 is absent. The DNA binding domain comprises several repeats of TALE monomers and this may be represented as (X1-11-(X12X13)-X14-33 or 34 or 35) z, where in an advantageous embodiment, z is at least 5 to 40. In a further advantageous embodiment, z is at least 10 to 26. The TALE monomers have a nucleotide binding affinity that is determined by the identity of the amino acids in its RVD. For example, polypeptide monomers with an RVD of NI preferentially bind to adenine (A), polypeptide monomers with an RVD of NG preferentially bind to thymine (T), polypeptide monomers with an RVD of HD preferentially bind to cytosine (C) and polypeptide monomers with an RVD of NN preferentially bind to both adenine (A) and guanine (G). In yet another embodiment of the invention, polypeptide monomers with an RVD of IG preferentially bind to T. Thus, the number and order of the polypeptide monomer repeats in the nucleic acid binding domain of a TALE determines its nucleic acid target specificity. In still further embodiments of the invention, polypeptide monomers with an RVD of NS recognize all four base pairs and may bind to A, T, G or C. The structure and function of TALEs is further described in, for example, Moscou et al., Science 326:1501 (2009); Boch et al., Science 326:1509-1512 (2009); and Zhang et al., Nature Biotechnology 29:149-153 (2011), each of which is incorporated by reference in its entirety.

[0187] In certain embodiments, the nucleic acid modification or mutation is effected by a (modified) zinc-finger nuclease (ZFN) system. The ZFN system uses artificial restriction enzymes generated by fusing a zinc finger DNA-binding domain to a DNA-cleavage domain that can be engineered to target desired DNA sequences. Exemplary methods of genome editing using ZFNs can be found for example in U.S. Pat. Nos. 6,534,261, 6,607,882, 6,746,838, 6,794,136, 6,824,978, 6,866,997, 6,933,113, 6,979,539, 7,013,219, 7,030,215, 7,220,719, 7,241,573, 7,241,574, 7,585,849, 7,595,376, 6,903,185, and 6,479,626, all of which are specifically incorporated by reference. By means of further guidance, and without limitation, artificial zinc-finger (ZF) technology involves arrays of ZF modules to target new DNA-binding sites in the genome. Each finger module in a ZF array targets three DNA bases. A customized array of individual zinc finger domains is assembled into a ZF protein (ZFP). ZFPs can comprise a functional domain. The first synthetic zinc finger nucleases (ZFNs) were developed by fusing a ZF protein to the catalytic domain of the Type IIS restriction enzyme FokI. (Kim, Y. G. et al., 1994, Chimeric restriction endonuclease, Proc. Natl. Acad. Sci. U.S.A. 91, 883-887; Kim, Y. G. et al., 1996, Hybrid restriction enzymes: zinc finger fusions to Fok I cleavage domain. Proc. Natl. Acad. Sci. U.S.A. 93, 1156-1160). Increased cleavage specificity can be attained with decreased off target activity by use of paired ZFN heterodimers, each targeting different nucleotide sequences separated by a short spacer. (Doyon, Y. et al., 2011, Enhancing zinc-finger-nuclease activity with improved obligate heterodimeric architectures. Nat. Methods 8, 74-79). ZFPs can also be designed as transcription activators and repressors and have been used to target many genes in a wide variety of organisms.

[0188] In certain embodiments, the nucleic acid modification is effected by a (modified) meganuclease, which are endodeoxyribonucleases characterized by a large recognition site (double-stranded DNA sequences of 12 to 40 base pairs). Exemplary method for using meganucleases can be found in U.S. Pat. No. 8,163,514; 8,133,697; 8,021,867; 8,119,361; 8,119,381; 8,124,369; and 8,129,134, which are specifically incorporated by reference.

[0189] In certain embodiments, the nucleic acid modification is effected by a (modified) CRISPR/Cas complex or system. With respect to general information on CRISPR/Cas Systems, components thereof, and delivery of such components, including methods, materials, delivery vehicles, vectors, particles, and making and using thereof, including as to amounts and formulations, as well as Cas9CRISPR/Cas-expressing eukaryotic cells, Cas-9 CRISPR/Cas expressing eukaryotes, such as a mouse, reference is made to: U.S. Pat. Nos. 8,999,641, 8,993,233, 8,697,359, 8,771,945, 8,795,965, 8,865,406, 8,871,445, 8,889,356, 8,889,418, 8,895,308, 8,906,616, 8,932,814, 8,945,839, 8,993,233 and 8,999,641; US Patent Publications US 2014-0310830 (U.S. application Ser. No. 14/105,031), US 2014-0287938 A1 (U.S. application Ser. No. 14/213,991), US 2014-0273234 A1 (U.S. application Ser. No. 14/293,674), US2014-0273232 A1 (U.S. application Ser. No. 14/290,575), US 2014-0273231 (U.S. application Ser. No. 14/259,420), US 2014-0256046 A1 (U.S. application Ser. No. 14/226,274), US 2014-0248702 A1 (U.S. application Ser. No. 14/258,458), US 2014-0242700 A1 (U.S. application Ser. No. 14/222,930), US 2014-0242699 A1 (U.S. application Ser. No. 14/183,512), US 2014-0242664 A1 (U.S. application Ser. No. 14/104,990), US 2014-0234972 A1 (U.S. application Ser. No. 14/183,471), US 2014-0227787 A1 (U.S. application Ser. No. 14/256,912), US 2014-0189896 A1 (U.S. application Ser. No. 14/105,035), US 2014-0186958 (U.S. application Ser. No. 14/105,017), US 2014-0186919 A1 (U.S. application Ser. No. 14/104,977), US 2014-0186843 A1 (U.S. application Ser. No. 14/104,900), US 2014-0179770 A1 (U.S. application Ser. No. 14/104,837) and US 2014-0179006 A1 (U.S. application Ser. No. 14/183,486), US 2014-0170753 (U.S. application Ser. No. 14/183,429); US 2015-0184139 (U.S. application Ser. No. 14/324,960); Ser. No. 14/054,414 European Patent Applications EP 2 771 468 (EP13818570.7), EP 2 764 103 (EP13824232.6), and EP 2 784 162 (EP14170383.5); and PCT Patent Publications WO 2014/093661 (PCT/US2013/074743), WO 2014/093694 (PCT/US2013/074790), WO 2014/093595 (PCT/US2013/074611), WO 2014/093718 (PCT/US2013/074825), WO 2014/093709 (PCT/US2013/074812), WO 2014/093622 (PCT/US2013/074667), WO 2014/093635 (PCT/US2013/074691), WO 2014/093655 (PCT/US2013/074736), WO 2014/093712 (PCT/US2013/074819), WO 2014/093701 (PCT/US2013/074800), WO 2014/018423 (PCT/US2013/051418), WO 2014/204723 (PCT/US2014/041790), WO 2014/204724 (PCT/US2014/041800), WO 2014/204725 (PCT/US2014/041803), WO 2014/204726 (PCT/US2014/041804), WO 2014/204727 (PCT/US2014/041806), WO 2014/204728 (PCT/US2014/041808), WO 2014/204729 (PCT/US2014/041809), WO 2015/089351 (PCT/US2014/069897), WO 2015/089354 (PCT/US2014/069902), WO 2015/089364 (PCT/US2014/069925), WO 2015/089427 (PCT/US2014/070068), WO 2015/089462 (PCT/US2014/070127), WO 2015/089419 (PCT/US2014/070057), WO 2015/089465 (PCT/US2014/070135), WO 2015/089486 (PCT/US2014/070175), PCT/US2015/051691, PCT/US2015/051830. Reference is also made to U.S. provisional patent applications 61/758,468; 61/802,174; 61/806,375; 61/814,263; 61/819,803 and 61/828,130, filed on Jan. 30, 2013; Mar. 15, 2013; Mar. 28, 2013; Apr. 20, 2013; May 6, 2013 and May 28, 2013 respectively. Reference is also made to US provisional patent application 61/836,123, filed on Jun. 17, 2013. Reference is additionally made to U.S. provisional patent applications 61/835,931, 61/835,936, 61/835,973, 61/836,080, 61/836,101, and 61/836,127, each filed Jun. 17, 2013. Further reference is made to U.S. provisional patent applications 61/862,468 and 61/862,355 filed on Aug. 5, 2013; 61/871,301 filed on Aug. 28, 2013; 61/960,777 filed on Sep. 25, 2013 and 61/961,980 filed on Oct. 28, 2013. Reference is yet further made to: PCT/US2014/62558 filed Oct. 28, 2014, and U.S. Provisional Patent Applications Ser. Nos. 61/915,148, 61/915,150, 61/915,153, 61/915,203, 61/915,251, 61/915,301, 61/915,267, 61/915,260, and 61/915,397, each filed Dec. 12, 2013; 61/757,972 and 61/768,959, filed on Jan. 29, 2013 and Feb. 25, 2013; 62/010,888 and 62/010,879, both filed Jun. 11, 2014; 62/010,329, 62/010,439 and 62/010,441, each filed Jun. 10, 2014; 61/939,228 and 61/939,242, each filed Feb. 12, 2014; 61/980,012, filed Apr. 15, 2014; 62/038,358, filed Aug. 17, 2014; 62/055,484, 62/055,460 and 62/055,487, each filed Sep. 25, 2014; and 62/069,243, filed Oct. 27, 2014. Reference is made to PCT application designating, inter alia, the United States, application No. PCT/US14/41806, filed Jun. 10, 2014. Reference is made to U.S. provisional patent application 61/930,214 filed on Jan. 22, 2014. Reference is made to PCT application designating, inter alia, the United States, application No. PCT/US14/41806, filed Jun. 10, 2014. Mention is also made of U.S. application 62/180,709, 17-Jun-15, PROTECTED GUIDE RNAS (PGRNAS); U.S. application 62/091,455, filed, 12-Dec-14, PROTECTED GUIDE RNAS (PGRNAS); U.S. application 62/096,708, 24-Dec-14, PROTECTED GUIDE RNAS (PGRNAS); U.S. applications 62/091,462, 12-Dec-14, 62/096,324, 23-Dec-14, 62/180,681, 17 Jun. 2015, and 62/237,496, 5 Oct. 2015, DEAD GUIDES FOR CRISPR TRANSCRIPTION FACTORS; U.S. application 62/091,456, 12-Dec-14 and 62/180,692, 17 Jun. 2015, ESCORTED AND FUNCTIONALIZED GUIDES FOR CRISPR-CAS SYSTEMS; U.S. application 62/091,461, 12-Dec-14, DELIVERY, USE AND THERAPEUTIC APPLICATIONS OF THE CRISPR-CAS SYSTEMS AND COMPOSITIONS FOR GENOME EDITING AS TO HEMATOPOETIC STEM CELLS (HSCs); U.S. application 62/094,903, 19-Dec-14, UNBIASED IDENTIFICATION OF DOUBLE-STRAND BREAKS AND GENOMIC REARRANGEMENT BY GENOME-WISE INSERT CAPTURE SEQUENCING; U.S. application 62/096,761, 24-Dec-14, ENGINEERING OF SYSTEMS, METHODS AND OPTIMIZED ENZYME AND GUIDE SCAFFOLDS FOR SEQUENCE MANIPULATION; U.S. application 62/098,059, 30-Dec-14, 62/181,641, 18 Jun. 2015, and 62/181,667, 18 Jun. 2015, RNA-TARGETING SYSTEM; U.S. application 62/096,656, 24-Dec-14 and 62/181,151, 17 Jun. 2015, CRISPR HAVING OR ASSOCIATED WITH DESTABILIZATION DOMAINS; U.S. application 62/096,697, 24-Dec-14, CRISPR HAVING OR ASSOCIATED WITH AAV; U.S. application 62/098,158, 30-Dec-14, ENGINEERED CRISPR COMPLEX INSERTIONAL TARGETING SYSTEMS; U.S. application 62/151,052, 22-Apr-15, CELLULAR TARGETING FOR EXTRACELLULAR EXOSOMAL REPORTING; U.S. application 62/054,490, 24-Sep-14, DELIVERY, USE AND THERAPEUTIC APPLICATIONS OF THE CRISPR-CAS SYSTEMS AND COMPOSITIONS FOR TARGETING DISORDERS AND DISEASES USING PARTICLE DELIVERY COMPONENTS; US application 61/939,154, 12-F EB-14, SYSTEMS, METHODS AND COMPOSITIONS FOR SEQUENCE MANIPULATION WITH OPTIMIZED FUNCTIONAL CRISPR-CAS SYSTEMS; U.S. application 62/055,484, 25-Sep-14, SYSTEMS, METHODS AND COMPOSITIONS FOR SEQUENCE MANIPULATION WITH OPTIMIZED FUNCTIONAL CRISPR-CAS SYSTEMS; U.S. application 62/087,537, 4-Dec-14, SYSTEMS, METHODS AND COMPOSITIONS FOR SEQUENCE MANIPULATION WITH OPTIMIZED FUNCTIONAL CRISPR-CAS SYSTEMS; U.S. application 62/054,651, 24-Sep-14, DELIVERY, USE AND THERAPEUTIC APPLICATIONS OF THE CRISPR-CAS SYSTEMS AND COMPOSITIONS FOR MODELING COMPETITION OF MULTIPLE CANCER MUTATIONS IN VIVO; U.S. application 62/067,886, 23-Oct-14, DELIVERY, USE AND THERAPEUTIC APPLICATIONS OF THE CRISPR-CAS SYSTEMS AND COMPOSITIONS FOR MODELING COMPETITION OF MULTIPLE CANCER MUTATIONS IN VIVO; U.S. applications 62/054,675, 24-Sep-14 and 62/181,002, 17 Jun. 2015, DELIVERY, USE AND THERAPEUTIC APPLICATIONS OF THE CRISPR-CAS SYSTEMS AND COMPOSITIONS IN NEURONAL CELLS/TISSUES; U.S. application 62/054,528, 24-Sep-14, DELIVERY, USE AND THERAPEUTIC APPLICATIONS OF THE CRISPR-CAS SYSTEMS AND COMPOSITIONS IN IMMUNE DISEASES OR DISORDERS; U.S. application 62/055,454, 25-Sep-14, DELIVERY, USE AND THERAPEUTIC APPLICATIONS OF THE CRISPR-CAS SYSTEMS AND COMPOSITIONS FOR TARGETING DISORDERS AND DISEASES USING CELL PENETRATION PEPTIDES (CPP); U.S. application 62/055,460, 25-Sep-14, MULTIFUNCTIONAL-CRISPR COMPLEXES AND/OR OPTIMIZED ENZYME LINKED FUNCTIONAL-CRISPR COMPLEXES; U.S. application 62/087,475, 4-Dec-14 and 62/181,690, 18 Jun. 2015, FUNCTIONAL SCREENING WITH OPTIMIZED FUNCTIONAL CRISPR-CAS SYSTEMS; U.S. application 62/055,487, 25-Sep-14, FUNCTIONAL SCREENING WITH OPTIMIZED FUNCTIONAL CRISPR-CAS SYSTEMS; U.S. application 62/087,546, 4-Dec-14 and 62/181,687, 18 Jun. 2015, MULTIFUNCTIONAL CRISPR COMPLEXES AND/OR OPTIMIZED ENZYME LINKED FUNCTIONAL-CRISPR COMPLEXES; and U.S. application 62/098,285, 30-Dec-14, CRISPR MEDIATED IN VIVO MODELING AND GENETIC SCREENING OF TUMOR GROWTH AND METASTASIS. Mention is made of U.S. applications 62/181,659, 18 Jun. 2015 and 62/207,318, 19 Aug. 2015, ENGINEERING AND OPTIMIZATION OF SYSTEMS, METHODS, ENZYME AND GUIDE SCAFFOLDS OF CAS9 ORTHOLOGS AND VARIANTS FOR SEQUENCE MANIPULATION. Mention is made of U.S. applications 62/181,663, 18 Jun. 2015 and 62/245,264, 22 Oct. 2015, NOVEL CRISPR ENZYMES AND SYSTEMS, U.S. applications 62/181,675, 18 Jun. 2015, and Attorney Docket No. 46783.01.2128, filed 22 Oct. 2015, NOVEL CRISPR ENZYMES AND SYSTEMS, U.S. application 62/232,067, 24 Sep. 2015, U.S. application 62/205,733, 16 Aug. 2015, U.S. application 62/201,542, 5 Aug. 2015, U.S. application 62/193,507, 16 Jul. 2015, and U.S. application 62/181,739, 18 Jun. 2015, each entitled NOVEL CRISPR ENZYMES AND SYSTEMS and of U.S. application 62/245,270, 22 Oct. 2015, NOVEL CRISPR ENZYMES AND SYSTEMS. Mention is also made of U.S. application 61/939,256, 12 Feb. 2014, and WO 2015/089473 (PCT/US2014/070152), 12-Dec-2014, each entitled ENGINEERING OF SYSTEMS, METHODS AND OPTIMIZED GUIDE COMPOSITIONS WITH NEW ARCHITECTURES FOR SEQUENCE MANIPULATION. Mention is also made of PCT/US2015/045504, 15 Aug. 2015, U.S. application 62/180,699, 17 Jun. 2015, and U.S. application 62/038,358, 17 Aug. 2014, each entitled GENOME EDITING USING CAS9 NICKASES. European patent application EP3009511. Reference is further made to Multiplex genome engineering using CRISPR/Cas systems. Cong, L., Ran, F. A., Cox, D., Lin, S., Barretto, R., Habib, N., Hsu, P. D., Wu, X., Jiang, W., Marraffini, L. A., & Zhang, F. Science Feb 15; 339 (6121): 819-23 (2013); RNA-guided editing of bacterial genomes using CRISPR-Cas systems. Jiang W., Bikard D., Cox D., Zhang F, Marraffini LA. Nat Biotechnol Mar; 31 (3): 233-9 (2013); One-Step Generation of Mice Carrying Mutations in Multiple Genes by CRISPR/Cas-Mediated Genome Engineering. Wang H., Yang H., Shivalila CS., Dawlaty MM., Cheng A W., Zhang F., Jaenisch R. Cell May 9; 153 (4): 910-8 (2013); Optical control of mammalian endogenous transcription and epigenetic states. Konermann S, Brigham MD, Trevino AE, Hsu PD, Heidenreich M, Cong L, Platt RJ, Scott D A, Church GM, Zhang F. Nature. 2013 Aug. 22; 500 (7463): 472-6. doi: 10.1038/Nature 12466. Epub 2013 Aug. 23; Double Nicking by RNA-Guided CRISPR Cas9 for Enhanced Genome Editing Specificity. Ran, F A., Hsu, P D., Lin, C Y., Gootenberg, J S., Konermann, S., Trevino, A E., Scott, D A., Inoue, A., Matoba, S., Zhang, Y., & Zhang, F. Cell August 28. pii: S0092-8674 (13) 01015-5. (2013); DNA targeting specificity of RNA-guided Cas9 nucleases. Hsu, P., Scott, D., Weinstein, J., Ran, F A., Konermann, S., Agarwala, V., Li, Y., Fine, E., Wu, X., Shalem, O., Cradick, T J., Marraffini, L A., Bao, G., & Zhang, F. Nat Biotechnol doi:10.1038/nbt.2647 (2013); Genome engineering using the CRISPR-Cas9 system. Ran, F A., Hsu, P D., Wright, J., Agarwala, V., Scott, D A., Zhang, F. Nature Protocols Nov; 8 (11): 2281-308. (2013); Genome-Scale CRISPR-Cas9 Knockout Screening in Human Cells. Shalem, O., Sanjana, N E., Hartenian, E., Shi, X., Scott, D A., Mikkelson, T., Heckl, D., Ebert, B L., Root, D E., Doench, JG., Zhang, F. Science December 12. (2013). [Epub ahead of print]; Crystal structure of cas9 in complex with guide RNA and target DNA. Nishimasu, H., Ran, F A., Hsu, P D., Konermann, S., Shehata, S I., Dohmae, N., Ishitani, R., Zhang, F., Nureki, O. Cell February 27. (2014). 156 (5): 935-49; Genome-wide binding of the CRISPR endonuclease Cas9 in mammalian cells. Wu X., Scott D A., Kriz A J., Chiu A C., Hsu P D., Dadon D B., Cheng A W., Trevino A E., Konermann S., Chen S., Jaenisch R., Zhang F., Sharp PA. Nat Biotechnol. (2014) April 20. doi: 10.1038/nbt.2889; CRISPR-Cas9 Knockin Mice for Genome Editing and Cancer Modeling, Platt et al., Cell 159 (2): 440-455 (2014) DOI: 10.1016/j.cell.2014.09.014; Development and Applications of CRISPR-Cas9 for Genome Engineering, Hsu et al, Cell 157, 1262-1278 (Jun. 5, 2014) (Hsu 2014); Genetic screens in human cells using the CRISPR/Cas9 system, Wang et al., Science. 2014 Jan. 3; 343 (6166): 80-84. doi:10.1126/science. 1246981; Rational design of highly active sgRNAs for CRISPR-Cas9-mediated gene inactivation, Doench et al., Nature Biotechnology 32 (12): 1262-7 (2014) published online 3 Sep. 2014; doi:10.1038/nbt.3026, and In vivo interrogation of gene function in the mammalian brain using CRISPR-Cas9, Swiech et al, Nature Biotechnology 33, 102-106 (2015) published online 19 Oct. 2014; doi:10.1038/nbt.3055, Cpf1 Is a Single RNA-Guided Endonuclease of a Class 2 CRISPR-Cas System, Zetsche et al., Cell 163, 1-13 (2015); Discovery and Functional Characterization of Diverse Class 2 CRISPR-Cas Systems, Shmakov et al., Mol Cell 60 (3): 385-397 (2015); C2c2 is a single-component programmable RNA-guided RNA-targeting CRISPR effector, Abudayyeh et al, Science (2016) published online Jun. 2, 2016 doi: 10.1126/science.aaf5573. Each of these publications, patents, patent publications, and applications, and all documents cited therein or during their prosecution (“appln cited documents”) and all documents cited or referenced in the appln cited documents, together with any instructions, descriptions, product specifications, and product sheets for any products mentioned therein or in any document therein and incorporated by reference herein, are hereby incorporated herein by reference, and may be employed in the practice of the invention. All documents (e.g., these patents, patent publications and applications and the appln cited documents) are incorporated herein by reference to the same extent as if each individual document was specifically and individually indicated to be incorporated by reference.

[0190] In certain embodiments, the CRISPR/Cas system or complex is a class 2 CRISPR/Cas system. In certain embodiments, said CRISPR/Cas system or complex is a type II, type V, or type VI CRISPR/Cas system or complex. The CRISPR/Cas system does not require the generation of customized proteins to target specific sequences but rather a single Cas protein can be programmed by an RNA guide (gRNA) to recognize a specific nucleic acid target, in other words the Cas enzyme protein can be recruited to a specific nucleic acid target locus (which may comprise or consist of RNA and/or DNA) of interest using said short RNA guide.

[0191] In general, the CRISPR/Cas or CRISPR system is as used herein foregoing documents refers collectively to transcripts and other elements involved in the expression of or directing the activity of CRISPR-associated (“Cas”) genes, including sequences encoding a Cas gene and one or more of, a tracr (trans-activating CRISPR) sequence (e.g. tracrRNA or an active partial tracrRNA), a tracr-mate sequence (encompassing a “direct repeat” and a tracrRNA-processed partial direct repeat in the context of an endogenous CRISPR system), a guide sequence (also referred to as a “spacer” in the context of an endogenous CRISPR system), or “RNA(s)” as that term is herein used (e.g., RNA(s) to guide Cas, such as Cas9, e.g. CRISPR RNA and, where applicable, transactivating (tracr) RNA or a single guide RNA (sgRNA) (chimeric RNA)) or other sequences and transcripts from a CRISPR locus. In general, a CRISPR system is characterized by elements that promote the formation of a CRISPR complex at the site of a target sequence (also referred to as a protospacer in the context of an endogenous CRISPR system). In the context of formation of a CRISPR complex, “target sequence” refers to a sequence to which a guide sequence is designed to have complementarity, where hybridization between a target sequence and a guide sequence promotes the formation of a CRISPR complex. A target sequence may comprise any polynucleotide, such as DNA or RNA polynucleotides.

[0192] In certain embodiments, the gRNA is a chimeric guide RNA or single guide RNA (sgRNA). In certain embodiments, the gRNA comprises a guide sequence and a tracr mate sequence (or direct repeat). In certain embodiments, the gRNA comprises a guide sequence, a tracr mate sequence (or direct repeat), and a tracr sequence. In certain embodiments, the CRISPR/Cas system or complex as described herein does not comprise and/or does not rely on the presence of a tracr sequence (e.g. if the Cas protein is Cpf1).

[0193] As used herein, the term “crRNA” or “guide RNA” or “single guide RNA” or “sgRNA” or “one or more nucleic acid components” of a CRISPR/Cas locus effector protein, as applicable, comprises any polynucleotide sequence having sufficient complementarity with a target nucleic acid sequence to hybridize with the target nucleic acid sequence and direct sequence-specific binding of a nucleic acid-targeting complex to the target nucleic acid sequence. In some embodiments, the degree of complementarity, when optimally aligned using a suitable alignment algorithm, is about or more than about 50%, 60%, 75%, 80%, 85%, 90%, 95%, 97.5%, 99%, or more. Optimal alignment may be determined with the use of any suitable algorithm for aligning sequences, non-limiting example of which include the Smith-Waterman algorithm, the Needleman-Wunsch algorithm, algorithms based on the Burrows-Wheeler Transform (e.g., the Burrows Wheeler Aligner), ClustalW, Clustal X, BLAT, Novoalign (Novocraft Technologies; available at www.novocraft.com), ELAND (Illumina, San Diego, CA), SOAP (available at soap.genomics.org.cn), and Maq (available at maq.sourceforge.net). The ability of a guide sequence (within a nucleic acid-targeting guide RNA) to direct sequence-specific binding of a nucleic acid-targeting complex to a target nucleic acid sequence may be assessed by any suitable assay.

[0194] A guide sequence, and hence a nucleic acid-targeting guide RNA may be selected to target any target nucleic acid sequence. The target sequence may be DNA. The target sequence may be genomic DNA. The target sequence may be mitochondrial DNA. The target sequence may be any RNA sequence. In some embodiments, the target sequence may be a sequence within a RNA molecule selected from the group consisting of messenger RNA (mRNA), pre-mRNA, ribosomal RNA (rRNA), transfer RNA (tRNA), micro-RNA (miRNA), small interfering RNA (siRNA), small nuclear RNA (snRNA), small nucleolar RNA (snoRNA), double stranded RNA (dsRNA), non-coding RNA (ncRNA), long non-coding RNA (lncRNA), and small cytoplasmatic RNA (scRNA). In some preferred embodiments, the target sequence may be a sequence within a RNA molecule selected from the group consisting of mRNA, pre-mRNA, and rRNA. In some preferred embodiments, the target sequence may be a sequence within a RNA molecule selected from the group consisting of ncRNA, and lncRNA. In some more preferred embodiments, the target sequence may be a sequence within an mRNA molecule or a pre-mRNA molecule.

[0195] In certain embodiments, the gRNA comprises a stem loop, preferably a single stem loop. In certain embodiments, the direct repeat sequence forms a stem loop, preferably a single stem loop.

[0196] In certain embodiments, the spacer length of the guide RNA is from 15 to 35 nt. In certain embodiments, the spacer length of the guide RNA is at least 15 nucleotides. In certain embodiments, the spacer length is from 15 to 17 nt, e.g., 15, 16, or 17 nt, from 17 to 20 nt, e.g., 17, 18, 19, or 20 nt, from 20 to 24 nt, e.g., 20, 21, 22, 23, or 24 nt, from 23 to 25 nt, e.g., 23, 24, or 25 nt, from 24 to 27 nt, e.g., 24, 25, 26, or 27 nt, from 27-30 nt, e.g., 27, 28, 29, or 30 nt, from 30-35 nt, e.g., 30, 31, 32, 33, 34, or 35 nt, or 35 nt or longer. In particular embodiments, the CRISPR/Cas system requires a tracrRNA. The “tracrRNA” sequence or analogous terms includes any polynucleotide sequence that has sufficient complementarity with a crRNA sequence to hybridize. In some embodiments, the degree of complementarity between the tracrRNA sequence and crRNA sequence along the length of the shorter of the two when optimally aligned is about or more than about 25%, 30%, 40%, 50%, 60%, 70%, 80%, 90%, 95%, 97.5%, 99%, or higher. In some embodiments, the tracr sequence is about or more than about 5, 6, 7, 8, 9, 10, 11, 12, 13, 14, 15, 16, 17, 18, 19, 20, 25, 30, 40, 50, or more nucleotides in length. In some embodiments, the tracr sequence and gRNA sequence are contained within a single transcript, such that hybridization between the two produces a transcript having a secondary structure, such as a hairpin. In an embodiment of the invention, the transcript or transcribed polynucleotide sequence has at least two or more hairpins. In preferred embodiments, the transcript has two, three, four or five hairpins. In a further embodiment of the invention, the transcript has at most five hairpins. In a hairpin structure the portion of the sequence 5′ of the final “N” and upstream of the loop may correspond to the tracr mate sequence, and the portion of the sequence 3′ of the loop then corresponds to the tracr sequence. In a hairpin structure the portion of the sequence 5′ of the final “N” and upstream of the loop may alternatively correspond to the tracr sequence, and the portion of the sequence 3′ of the loop corresponds to the tracr mate sequence. In alternative embodiments, the CRISPR/Cas system does not require a tracrRNA, as is known by the skilled person.

[0197] In certain embodiments, the guide RNA (capable of guiding Cas to a target locus) may comprise (1) a guide sequence capable of hybridizing to a target locus and (2) a tracr mate or direct repeat sequence (in 5′ to 3′ orientation, or alternatively in 3′ to 5′ orientation, depending on the type of Cas protein, as is known by the skilled person). In particular embodiments, the CRISPR/Cas protein is characterized in that it makes use of a guide RNA comprising a guide sequence capable of hybridizing to a target locus and a direct repeat sequence, and does not require a tracrRNA. In particular embodiments, where the CRISPR/Cas protein is characterized in that it makes use of a tracrRNA, the guide sequence, tracr mate, and tracr sequence may reside in a single RNA, i.e. an sgRNA (arranged in a 5′ to 3′ orientation or alternatively arranged in a 3′ to 5′ orientation), or the tracr RNA may be a different RNA than the RNA containing the guide and tracr mate sequence. In these embodiments, the tracr hybridizes to the tracr mate sequence and directs the CRISPR/Cas complex to the target sequence.

[0198] Typically, in the context of an endogenous nucleic acid-targeting system, formation of a nucleic acid-targeting complex (comprising a guide RNA hybridized to a target sequence and complexed with one or more nucleic acid-targeting effector proteins) results in modification (such as cleavage) of one or both DNA or RNA strands in or near (e.g., within 1, 2, 3, 4, 5, 6, 7, 8, 9, 10, 20, 50, or more base pairs from) the target sequence. As used herein the term “sequence(s) associated with a target locus of interest” refers to sequences near the vicinity of the target sequence (e.g. within 1, 2, 3, 4, 5, 6, 7, 8, 9, 10, 20, 50, or more base pairs from the target sequence, wherein the target sequence is comprised within a target locus of interest). The skilled person will be aware of specific cut sites for selected CRISPR/Cas systems, relative to the target sequence, which as is known in the art may be within the target sequence or alternatively 3′ or 5′ of the target sequence.

[0199] In some embodiments, the unmodified nucleic acid-targeting effector protein may have nucleic acid cleavage activity. In some embodiments, the nuclease as described herein may direct cleavage of one or both nucleic acid (DNA, RNA, or hybrids, which may be single or double stranded) strands at the location of or near a target sequence, such as within the target sequence and/or within the complement of the target sequence or at sequences associated with the target sequence. In some embodiments, the nucleic acid-targeting effector protein may direct cleavage of one or both DNA or RNA strands within about 1, 2, 3, 4, 5, 6, 7, 8, 9, 10, 15, 20, 25, 50, 100, 200, 500, or more base pairs from the first or last nucleotide of a target sequence. In some embodiments, the cleavage may be blunt (e.g. for Cas9, such as SaCas9 or SpCas9). In some embodiments, the cleavage may be staggered (e.g. for Cpf1), i.e. generating sticky ends. In some embodiments, the cleavage is a staggered cut with a 5′ overhang. In some embodiments, the cleavage is a staggered cut with a 5′ overhang of 1 to 5 nucleotides, preferably of 4 or 5 nucleotides. In some embodiments, the cleavage site is upstream of the PAM. In some embodiments, the cleavage site is downstream of the PAM. In some embodiments, the nucleic acid-targeting effector protein that may be mutated with respect to a corresponding wild-type enzyme such that the mutated nucleic acid-targeting effector protein lacks the ability to cleave one or both DNA or RNA strands of a target polynucleotide containing a target sequence. As a further example, two or more catalytic domains of a Cas protein (e.g. RuvC I, RuvC II, and RuvC III or the HNH domain of a Cas9 protein) may be mutated to produce a mutated Cas protein substantially lacking all DNA cleavage activity. In some embodiments, a nucleic acid-targeting effector protein may be considered to substantially lack all DNA and/or RNA cleavage activity when the cleavage activity of the mutated enzyme is about no more than 25%, 10%, 5%, 1%, 0.1%, 0.01%, or less of the nucleic acid cleavage activity of the non-mutated form of the enzyme; an example can be when the nucleic acid cleavage activity of the mutated form is nil or negligible as compared with the non-mutated form. As used herein, the term “modified” Cas generally refers to a Cas protein having one or more modifications or mutations (including point mutations, truncations, insertions, deletions, chimeras, fusion proteins, etc.) compared to the wild type Cas protein from which it is derived. By derived is meant that the derived enzyme is largely based, in the sense of having a high degree of sequence homology with, a wildtype enzyme, but that it has been mutated (modified) in some way as known in the art or as described herein.

[0200] In certain embodiments, the target sequence should be associated with a PAM (protospacer adjacent motif) or PFS (protospacer flanking sequence or site); that is, a short sequence recognized by the CRISPR complex. The precise sequence and length requirements for the PAM differ depending on the CRISPR enzyme used, but PAMs are typically 2-5 base pair sequences adjacent the protospacer (that is, the target sequence). Examples of PAM sequences are given in the examples section below, and the skilled person will be able to identify further PAM sequences for use with a given CRISPR enzyme. Further, engineering of the PAM Interacting (PI) domain may allow programing of PAM specificity, improve target site recognition fidelity, and increase the versatility of the Cas, e.g. Cas9, genome engineering platform. Cas proteins, such as Cas9 proteins may be engineered to alter their PAM specificity, for example as described in Kleinstiver B P et al. Engineered CRISPR-Cas9 nucleases with altered PAM specificities. Nature. 2015 Jul. 23; 523 (7561): 481-5. doi: 10.1038/nature14592. In some embodiments, the method comprises allowing a CRISPR complex to bind to the target polynucleotide to effect cleavage of said target polynucleotide thereby modifying the target polynucleotide, wherein the CRISPR complex comprises a CRISPR enzyme complexed with a guide sequence hybridized to a target sequence within said target polynucleotide, wherein said guide sequence is linked to a tracr mate sequence which in turn hybridizes to a tracr sequence. The skilled person will understand that other Cas proteins may be modified analogously.

[0201] The Cas protein as referred to herein, such as without limitation Cas9, Cpf1 (Cas12a), C2c1 (Cas12b), C2c2 (Cas13a), C2c3, Cas13b protein, may originate from any suitable source, and hence may include different orthologues, originating from a variety of (prokaryotic) organisms, as is well documented in the art. In certain embodiments, the Cas protein is (modified) Cas9, preferably (modified) Staphylococcus aureus Cas9 (SaCas9) or (modified) Streptococcus pyogenes Cas9 (SpCas9). In certain embodiments, the Cas protein is (modified) Cpf1, preferably Acidaminococcus sp., such as Acidaminococcus sp. BV3L6 Cpf1 (AsCpf1) or Lachnospiraceae bacterium Cpf1, such as Lachnospiraceae bacterium MA2020 or Lachnospiraceae bacterium MD2006 (LbCpf1). In certain embodiments, the Cas protein is (modified) C2c2, preferably Leptotrichia wadei C2c2 (LwC2c2) or Listeria newyorkensis FSL M6-0635 C2c2 (LbFSLC2c2). In certain embodiments, the (modified) Cas protein is C2c1. In certain embodiments, the (modified) Cas protein is C2c3. In certain embodiments, the (modified) Cas protein is Cas13b.

[0202] Further, gene editing may comprise also the exchange of single nucleotides by means of base editors. A base editor as used herein refers to a protein or a fragment thereof having the capacity to mediate a targeted base modification, i.e., the conversion of a base of interest resulting in a point mutation of interest. Preferably, the at least one base editor in the context of the present invention is temporarily or permanently fused to at least one DSBI enzyme, or optionally to a component of at least one DSBI. The fusion can be covalent and/or non-covalent. Multiple publications have shown targeted base conversion, primarily cytidine (C) to thymine (T), using a CRISPR/Cas9 nickase or non-functional nuclease linked to a cytidine deaminase domain, Apolipoprotein B mRNA-editing catalytic polypeptide (APOBEC1), e.g., APOBEC derived from rat. The deamination of cytosine (C) is catalysed by cytidine deaminases and results in uracil (U), which has the base-pairing properties of thymine (T). Most known cytidine deaminases operate on RNA, and the few examples that are known to accept DNA require single-stranded (ss) DNA. Studies on the dCas9-target DNA complex reveal that at least nine nucleotides (nt) of the displaced DNA strand are unpaired upon formation of the Cas9-guide RNA-DNA ‘R-loop’ complex (Jore et al., Nat. Struct. Mol. Biol., 18, 529-536 (2011)). Indeed, in the structure of the Cas9 R-loop complex, the first 11 nt of the protospacer on the displaced DNA strand are disordered, suggesting that their movement is not highly restricted. It has also been speculated that Cas9 nickase-induced mutations at cytosines in the non-template strand might arise from their accessibility by cellular cytosine deaminase enzymes. It was reasoned that a subset of this stretch of ssDNA in the R-loop might serve as an efficient substrate for a dCas9-tethered cytidine deaminase to effect direct, programmable conversion of C to U in DNA (Komor et al., supra). Recently, Goudelli et al ((2017). Programmable base editing of A⋅T to G⋅C in genomic DNA without DNA cleavage. Nature, 551 (7681), 464.) described adenine base editors (ABEs) that mediate the conversion of A⋅T to G⋅C in genomic DNA.

[0203] In certain embodiments, the nucleic acid modification is effected by random mutagenesis. The skilled person will understand that identification and selection of suitable mutations may include appropriate selection assays, such as functional selection assays (including genotypic or phenotypic selection assays). In random mutagenesis, cells or organisms may be exposed to mutagens such as UV, X-ray, or gamma ray radiation or mutagenic chemicals (such as for instance such as ethyl methanesulfonate (EMS), ethylnitrosourea (ENU), or dimethylsulfate (DMS), and mutants with desired characteristics are then selected. Mutants can for instance be identified by TILLING (Targeting Induced Local Lesions in Genomes). The method combines mutagenesis, such as mutagenesis using a chemical mutagen such as ethyl methanesulfonate (EMS) with a sensitive DNA screening-technique that identifies single base mutations/point mutations in a target gene. The TILLING method relies on the formation of DNA heteroduplexes that are formed when multiple alleles are amplified by PCR and are then heated and slowly cooled.

[0204] A “bubble” forms at the mismatch of the two DNA strands, which is then cleaved by a single stranded nuclease. The products are then separated by size, such as by HPLC. See also McCallum et al. “Targeted screening for induced mutations”; Nat Biotechnol. 2000 April; 18 (4): 455-7 and McCallum et al. “Targeting Induced Local Lesions IN Genomes (TILLING) for plant functional genomics”; Plant Physiol. 2000 June; 123 (2): 439-42, both incorporated by reference in their entirety. By means of further example, and without limitation, the methodologies described in the following publications, incorporated by reference in their entirety, may be adopted according to the present invention, such as in connection with EMS mutagenesis: Till et al. “Discovery of induced point mutations in maize genes by TILLING”; BMC Plant Biol. 2004 Jul. 28; 4:12; and Weil & Monde “Getting the point-mutations in maize” Crop Sci 2007; 47 S60-S67. The skilled person will understand that depending on the mutagen dose (irradiation of chemical) the (average) mutation density can be varied or fixed. In certain embodiments, the random mutagenesis is single nucleotide mutagenesis. In certain embodiments, the random mutagenesis is chemical mutagenesis, preferably EMS mutagenesis.

[0205] “RNA interference” or “RNAi” is a biological process in which RNA molecules inhibit gene expression or translation, by neutralizing targeted mRNA molecules. Two types of small ribonucleic acid (RNA) molecules—microRNA (miRNA) and small interfering RNA (siRNA)—are central to RNA interference. RNAs are the direct products of genes, and these small RNAs can bind to other specific messenger RNA (mRNA) molecules and either increase or decrease their activity, for example by preventing an mRNA from being translated into a protein. The RNAi pathway is found in many eukaryotes, including animals, and is initiated by the enzyme Dicer, which cleaves long double-stranded RNA (dsRNA) molecules into short double-stranded fragments of about 21 nucleotide siRNAs (small interfering RNAs). Each siRNA is unwound into two single-stranded RNAs (ssRNAs), the passenger strand and the guide strand. The passenger strand is degraded and the guide strand is incorporated into the RNA-induced silencing complex (RISC). Mature miRNAs are structurally similar to siRNAs produced from exogenous dsRNA, but before reaching maturity, miRNAs must first undergo extensive post-transcriptional modification. A miRNA is expressed from a much longer RNA-coding gene as a primary transcript known as a pri-miRNA which is processed, in the cell nucleus, to a 70-nucleotide stem-loop structure called a pre-miRNA by the microprocessor complex. This complex consists of an RNase III enzyme called Drosha and a dsRNA-binding protein DGCR8. The dsRNA portion of this pre-miRNA is bound and cleaved by Dicer to produce the mature miRNA molecule that can be integrated into the RISC complex; thus, miRNA and siRNA share the same downstream cellular machinery. A short hairpin RNA or small hairpin RNA (shRNA/Hairpin Vector) is an artificial RNA molecule with a tight hairpin turn that can be used to silence target gene expression via RNA interference. The most well-studied outcome is post-transcriptional gene silencing, which occurs when the guide strand pairs with a complementary sequence in a messenger RNA molecule and induces cleavage by Argonaute 2 (Ago2), the catalytic component of the RISC. In will be understood that the RNAi molecules can be applied as such to/in the plant, or can be encoded by appropriate vectors, from which the RNAi molecule is expressed. Delivery and expression systems of RNAi molecules, such as siRNAs, shRNAs or miRNAs are well known in the art.

[0206] As used herein, the term “homozygote” refers to an individual cell or plant having the same alleles at one or more or all loci. When the term is used with reference to a specific locus or gene, it means at least that locus or gene has the same alleles. Accordingly, for diploid organisms, the two alleles are identical, for tetraploid organisms, the 4 alleles are identical, etc. As used herein, the term “homozygous” means a genetic condition existing when identical alleles reside at corresponding loci on homologous chromosomes. As used herein, the term “heterozygote” refers to an individual cell or plant having different alleles at one or more or all loci. Accordingly, for diploid organisms, the two alleles are not identical, for tetraploid organisms, the 4 alleles are not identical (i.e. at least one allele is different than the other alleles), etc. When the term is used with reference to a specific locus or gene, it means at least that locus or gene has different alleles. As used herein, the term “heterozygous” means a genetic condition existing when different alleles reside at corresponding loci on homologous chromosomes. In certain embodiments, the genes, or coding sequences as described herein are heterozygous. In certain embodiments, genes or coding sequence alleles as described herein is/are homozygous. In certain embodiments, the genes or coding sequence alleles as described herein are heterozygous. It will be understood that homozygosity or heterozygosity preferably relates to at least a gene, i.e. the locus comprising the gene (or coding sequence derived thereof). However, more specifically, homozygosity or heterozygosity may equally refer to a particular mutation, such as a mutation described herein. Accordingly, a particular mutation can be considered to be homozygous (i.e. all alleles carry the mutation), whereas for instance the remainder of the gene, coding sequence, or protein may comprise differences between alleles.

[0207] In certain embodiments, the mutation as defined herein is homozygous. Accordingly, in diploid plants the two alleles are identical (at least with respect to the particular mutation), in tetraploid plants the four alleles are identical, and in hexaploid plants the six alleles are identical with respect to the mutation or marker. In certain embodiments, the mutation/marker as defined herein is heterozygous. Accordingly, in diploid plants the two alleles are not identical, in tetraploid plants the four alleles are not identical (for instance only one, two, or three alleles comprise the specific mutation/marker), and in hexaploid plants the six alleles are not identical with respect to the mutation or marker (for instance only one, two, three, four or five alleles comprise the specific mutation/marker). Similar considerations apply in case of pseudopolyploid pants.

[0208] A “marker” is a (means of finding a position on a) genetic or physical map, or else linkages among markers and trait loci (loci affecting traits). The position that the marker detects may be known via detection of polymorphic alleles and their genetic mapping, or else by hybridization, sequence match or amplification of a sequence that has been physically mapped. A marker can be a DNA marker (detects DNA polymorphisms), a protein (detects variation at an encoded polypeptide), or a simply inherited phenotype. A DNA marker can be developed from genomic nucleotide sequence or from expressed nucleotide sequences (e.g., from a spliced RNA or a cDNA). Depending on the DNA marker technology, the marker may consist of complementary primers flanking the locus and/or complementary probes that hybridize to polymorphic alleles at the locus. The term marker locus is the locus (gene, sequence or nucleotide) that the marker detects. “Marker” or “molecular marker” or “marker locus” or “marker allele” may also be used to denote a nucleic acid or amino acid sequence that is sufficiently unique to characterize a specific locus on the genome. Any detectable polymorphic trait can be used as a marker so long as it is inherited differentially and exhibits linkage disequilibrium with a phenotypic trait of interest.

[0209] The development of markers may be based either on quantitative trait loci (QTL) mapping or genome wide association studies (GWAS). A QTL mapping requires two parental lines (that differ genetically). These two types of mapping are referred to as low resolution mapping due to the fact that the identified chromosomal region (from now on called QTL interval) controlling the trait can contain up to several hundreds of genes within an interval size of 5-30 cM, depending on whether the QTL interval is in the telomeric or pericentromeric region. The reason for such a name is that both QTL mapping as well as GWAS generally only use rather a small size of population (100 to 200 lines), thus the size of the discovered chromosomal interval within which the gene exists becomes very large. Therefore, the markers flanking the identified chromosomal region in 100 percent of cases are not diagnostic, which means the marker score generated doesn't necessarily match the observed phenotype in the field. For this issue to be resolved, the mapping resolution needs to be increased, and the resolution can be increased by increasing recombination events during meiosis. To accomplish this, one has to increase the population to thousands of lines plus have different generations of selfing or back crossing that take at least four years (and are very expensive and labor-intensive). In reality, the breeder must perform high resolution mapping of fine mapping in order to have a marker nearer to the gene. In the initial screening, the thousands of individuals are screened only for initial flanking markers identified through low-resolution mapping. Such a screening aims to find recombinants. Recombination events between markers and the gene will allow to narrow down the interval and come closer to the gene. The next step is designing additional markers within the targeted interval. These may range for instance from ten to twenty markers, depending on how long an interval is. Then screen the newly identified recombinants with these 10-20 markers. This will help find the closest marker with the least number of recombination events between it and the gene, keeping in mind that the marker is only close to the gene, not within it, so there is still a possibility that the marker score does not match the observed phenotype. So, as you can see the approach requires a lot of time, efforts, and money should be invested. The use of literature-based markers is another possibility. It is more convenient and time-efficient if the information of the closet marker is already published, otherwise the publication is only beneficial to determine the corresponding chromosomal interval responsible for the trait of interest.

[0210] Markers that detect genetic polymorphisms between members of a population are well-established in the art. Markers can be defined by the type of polymorphism that they detect and also the marker technology used to detect the polymorphism. Marker types include but are not limited to, e.g., detection of restriction fragment length polymorphisms (RFLP), detection of isozyme markers, randomly amplified polymorphic DNA (RAPD), amplified fragment length polymorphisms (AFLPs), detection of simple sequence repeats (SSRs), detection of amplified variable sequences of the plant genome, detection of self-sustained sequence replication, or detection of single nucleotide polymorphisms (SNPs). SNPs can be detected e.g. via DNA sequencing, PCR-based sequence specific amplification methods, detection of polynucleotide polymorphisms by allele specific hybridization (ASH), dynamic allele-specific hybridization (DASH), molecular beacons, microarray hybridization, oligonucleotide ligase assays, Flap endonucleases, 5′ endonucleases, primer extension, single strand conformation polymorphism (SSCP) or temperature gradient gel electrophoresis (TGGE). DNA sequencing, such as the pyrosequencing technology has the advantage of being able to detect a series of linked SNP alleles that constitute a haplotype. Haplotypes tend to be more informative (detect a higher level of polymorphism) than SNPs.

[0211] A “marker allele”, alternatively an “allele of a marker locus”, can refer to one of a plurality of polymorphic nucleotide sequences found at a marker locus in a population. With regard to a SNP marker, allele refers to the specific nucleotide base present at that SNP locus in that individual plant. As used herein, reference to markers or marker alleles refers to markers or marker alleles associated with, linked with, or characteristic of the genes, genotypes, or phenotypes as described herein, unless explicitly referred to otherwise. Such markers or marker alleles are typically annotated as “donor” markers or marker alleles.

[0212] “Fine-mapping” refers to methods by which the position of a QTL can be determined more accurately (narrowed down) and by which the size of the introgression fragment comprising the QTL is reduced. For example Near Isogenic Lines for the QTL (QTL-NILs) can be made, which contain different, overlapping fragments of the introgression fragment within an otherwise uniform genetic background of the recurrent parent. Such lines can then be used to map on which fragment the QTL is located and to identify a line having a shorter introgression fragment comprising the QTL.

[0213] “Marker assisted selection” (of MAS) is a process by which individual plants are selected based on marker genotypes. “Marker assisted counter-selection” is a process by which marker genotypes are used to identify plants that will not be selected, allowing them to be removed from a breeding program or planting. Marker assisted selection uses the presence of molecular markers, which are genetically linked to a particular locus or to a particular chromosome region (e.g. introgression fragment, transgene, polymorphism, mutation, etc), to select plants for the presence of the specific locus or region (introgression fragment, transgene, polymorphism, mutation, etc). For example, a marker allele genetically linked to a QTL or gene as defined herein, can be used to detect and/or select plants comprising the QTL or gene. The closer the genetic linkage of the marker allele to the locus (e.g. about 10 cM, 7 cM, 6 cM, 5 cM, 4 cM, 3 cM, 2 cM, 1 cM, 0.5 cM or less), the less likely it is that the marker is dissociated from the locus through meiotic recombination. Likewise, the closer two markers are linked to each other (e.g. within 10 cM, 7 cM, 5 cM, 4 cM, 3 cM, 2 cM, 1 cM or less) the less likely it is that the two markers will be separated from one another (and the more likely they will co-segregate as a unit). A marker “within 10 cM or within 7 cM or within 5 cM, 3 cM, 2 cM, or 1 cM” of another marker refers to a marker which genetically maps to within the 10 cM or 7 cM or 5 cM, 3 cM, 2 cM, or 1 cM region flanking the marker (i.e. either side of the marker). Similarly, a marker within 10 Mb, 5 Mb, 3 Mb, 2.5 Mb, 2 Mb, 1 Mb, 0.5 Mb, 0.4 Mb, 0.3 Mb, 0.2 Mb, 0.1 Mb, 50 kb, 20 kb, 10 kb, 5 kb, 2 kb, 1 kb or less of another marker refers to a marker which is physically located within the 10 Mb, 5 Mb, 3 Mb, 2.5 Mb, 2 Mb, 1 Mb, 0.5 Mb, 0.4 Mb, 0.3 Mb, 0.2 Mb, 0.1 Mb, 50 kb, 20 kb, 10 kb, 5 kb, 2 kb, 1 kb or less, of the genomic DNA region flanking the marker (i.e. either side of the marker). “LOD-score” (logarithm (base 10) of odds) refers to a statistical test often used for linkage analysis in animal and plant populations. The LOD score compares the likelihood of obtaining the test data if the two loci (molecular marker loci and/or a phenotypic trait locus) are indeed linked, to the likelihood of observing the same data purely by chance. Positive LOD scores favour the presence of linkage and a LOD score greater than 3.0 is considered evidence for linkage. A LOD score of +3 indicates 1000 to 1 odds that the linkage being observed did not occur by chance.

[0214] A “marker haplotype” refers to a combination of alleles at a marker locus.

[0215] A “marker locus” is a specific chromosome location in the genome of a species where a specific marker can be found. A marker locus can be used to track the presence of a second linked locus, e.g., one that affects the expression of a phenotypic trait. For example, a marker locus can be used to monitor segregation of alleles at a genetically or physically linked locus.

[0216] A “marker probe” is a nucleic acid sequence or molecule that can be used to identify the presence of a marker locus, e.g., a nucleic acid probe that is complementary to a marker locus sequence, through nucleic acid hybridization. Marker probes comprising 30 or more contiguous nucleotides of the marker locus (“all or a portion” of the marker locus sequence) may be used for nucleic acid hybridization. Alternatively, in some aspects, a marker probe refers to a probe of any type that is able to distinguish (i.e., genotype) the particular allele that is present at a marker locus.

[0217] The term “molecular marker” may be used to refer to a genetic marker or an encoded product thereof (e.g., a protein) used as a point of reference when identifying a linked locus. A marker can be derived from genomic nucleotide sequences or from expressed nucleotide sequences (e.g., from a spliced RNA, a cDNA, etc.), or from an encoded polypeptide. The term also refers to nucleic acid sequences complementary to or flanking the marker sequences, such as nucleic acids used as probes or primer pairs capable of amplifying the marker sequence. A “molecular marker probe” is a nucleic acid sequence or molecule that can be used to identify the presence of a marker locus, e.g., a nucleic acid probe that is complementary to a marker locus sequence. Alternatively, in some aspects, a marker probe refers to a probe of any type that is able to distinguish (i.e., genotype) the particular allele that is present at a marker locus. Nucleic acids are “complementary” when they specifically hybridize in solution, e.g., according to Watson-Crick base pairing rules. Some of the markers described herein are also referred to as hybridization markers when located on an indel region, such as the non-collinear region described herein. This is because the insertion region is, by definition, a polymorphism vis a vis a plant without the insertion. Thus, the marker need only indicate whether the indel region is present or absent. Any suitable marker detection technology may be used to identify such a hybridization marker, e.g. SNP technology is used in the examples provided herein.

[0218] “Genetic markers” are nucleic acids that are polymorphic in a population and where the alleles of which can be detected and distinguished by one or more analytic methods, e.g., RFLP, AFLP, isozyme, SNP, SSR, and the like. The terms “molecular marker” and “genetic marker” are used interchangeably herein. The term also refers to nucleic acid sequences complementary to the genomic sequences, such as nucleic acids used as probes. Markers corresponding to genetic polymorphisms between members of a population can be detected by methods well-established in the art. These include, e.g., PCR-based sequence specific amplification methods, detection of restriction fragment length polymorphisms (RFLP), detection of isozyme markers, detection of polynucleotide polymorphisms by allele specific hybridization (ASH), detection of amplified variable sequences of the plant genome, detection of self-sustained sequence replication, detection of simple sequence repeats (SSRs), detection of single nucleotide polymorphisms (SNPs), or detection of amplified fragment length polymorphisms (AFLPs). Well established methods are also known for the detection of expressed sequence tags (ESTs) and SSR markers derived from EST sequences and randomly amplified polymorphic DNA (RAPD).

[0219] A “polymorphism” is a variation in the DNA between two or more individuals within a population. A polymorphism preferably has a frequency of at least 1% in a population. A useful polymorphism can include a single nucleotide polymorphism (SNP), a simple sequence repeat (SSR), or an insertion/deletion polymorphism, also referred to herein as an “indel”. The term “indel” refers to an insertion or deletion, wherein one line may be referred to as having an inserted nucleotide or piece of DNA relative to a second line, or the second line may be referred to as having a deleted nucleotide or piece of DNA relative to the first line.

[0220] “Physical distance” between loci (e.g. between molecular markers and/or between phenotypic markers) on the same chromosome is the actually physical distance expressed in bases or base pairs (bp), kilo bases or kilo base pairs (kb) or megabases or mega base pairs (Mb).

[0221] “Genetic distance” between loci (e.g. between molecular markers and/or between phenotypic markers) on the same chromosome is measured by frequency of crossing-over, or recombination frequency (RF) and is indicated in centimorgans (CM). One cM corresponds to a recombination frequency of 1%. If no recombinants can be found, the RF is zero and the loci are either extremely close together physically or they are identical. The further apart two loci are, the higher the RF.

[0222] A “physical map” of the genome is a map showing the linear order of identifiable landmarks (including genes, markers, etc.) on chromosome DNA. However, in contrast to genetic maps, the distances between landmarks are absolute (for example, measured in base pairs or isolated and overlapping contiguous genetic fragments) and not based on genetic recombination (that can vary in different populations).

[0223] An allele “negatively” correlates with a trait when it is linked to it and when presence of the allele is an indicator that a desired trait or trait form will not occur in a plant comprising the allele. An allele “positively” correlates with a trait when it is linked to it and when presence of the allele is an indicator that the desired trait or trait form will occur in a plant comprising the allele.

[0224] A centimorgan (“cM”) is a unit of measure of recombination frequency. One cM is equal to a 1% chance that a marker at one genetic locus will be separated from a marker at a second locus due to crossing over in a single generation.

[0225] As used herein, the term “chromosomal interval” designates a contiguous linear span of genomic DNA that resides in planta on a single chromosome. The genetic elements or genes located on a single chromosomal interval are physically linked. The size of a chromosomal interval is not particularly limited. In some aspects, the genetic elements located within a single chromosomal interval are genetically linked, typically with a genetic recombination distance of, for example, less than or equal to 20 cM, or alternatively, less than or equal to 10 cM. That is, two genetic elements within a single chromosomal interval undergo recombination at a frequency of less than or equal to 20% or 10%.

[0226] The term “linked” or “closely linked”, in the present application, means that recombination between two linked loci occurs with a frequency of equal to or less than about 10% (i.e., are separated on a genetic map by not more than 10 cM), or preferably less than about 5% (i.e. 5 cM), more preferably less than about 1% (i.e. 1 cM). Put another way, the closely linked loci co-segregate at least 90% (or 95% or 99%) of the time. Marker loci are especially useful with respect to the subject matter of the current disclosure when they demonstrate a significant probability of co-segregation (linkage) with a desired trait. Closely linked loci such as a marker locus and a second locus can display an inter-locus recombination frequency of 10% or less, preferably about 9% or less, still more preferably about 8% or less, yet more preferably about 7% or less, still more preferably about 6% or less, yet more preferably about 5% or less, still more preferably about 4% or less, yet more preferably about 3% or less, and still more preferably about 2% or less. In highly preferred embodiments, the relevant loci display a recombination a frequency of about 1% or less, e.g., about 0.75% or less, more preferably about 0.5% or less, or yet more preferably about 0.25% or less. Two loci that are localized to the same chromosome, and at such a distance that recombination between the two loci occurs at a frequency of less than 10% (e.g., about 9%, 8%, 7%, 6%, 5%, 4%, 3%, 2%, 1%, 0.75%, 0.5%, 0.25%, or less) are also said to be “proximal to” each other. In some cases, two different markers can have the same genetic map coordinates. In that case, the two markers are in such close proximity to each other that recombination occurs between them with such low frequency that it is undetectable.

[0227] “Linkage” refers to the tendency for alleles to segregate together more often than expected by chance if their transmission was independent. Typically, linkage refers to alleles on the same chromosome. Genetic recombination occurs with an assumed random frequency over the entire genome. Genetic maps are constructed by measuring the frequency of recombination between pairs of traits or markers. The closer the traits or markers are to each other on the chromosome, the lower the frequency of recombination, and the greater the degree of linkage. Traits or markers are considered herein to be linked if they generally co-segregate. A 1/100 probability of recombination per generation is defined as a genetic map distance of 1.0 centiMorgan (1.0 cM). The term “linkage disequilibrium” refers to a non-random segregation of genetic loci or traits (or both). In either case, linkage disequilibrium implies that the relevant loci are within sufficient physical proximity along a length of a chromosome so that they segregate together with greater than random (i.e., non-random) frequency. Markers that show linkage disequilibrium are considered linked. Linked loci co-segregate more than 50% of the time, e.g., from about 51% to about 100% of the time. In other words, two markers that co-segregate have a recombination frequency of less than 50% (and by definition, are separated by less than 50 cM on the same linkage group.) As used herein, linkage can be between two markers, or alternatively between a marker and a locus affecting a phenotype. A marker locus can be “associated with” (linked to) a trait. The degree of linkage of a marker locus and a locus affecting a phenotypic trait is measured, e.g., as a statistical probability of co-segregation of that molecular marker with the phenotype (e.g., an F statistic or LOD score).

[0228] Alternatively, and preferably according to the invention, a gene pair (such as the Myb80 and Dwarf11 genes) are within 1 Mbp from each other (i.e. on the same chromosome, preferably on the same chromosome arm). In other words, the distance between the two genes is at most 1 Mbp. As used herein, the distance refers to the intergenic distance, in particular the distance between the coding sequences (e.g. between stop codon of the most upstream gene and start codon of the most downstream gene or vice versa, depending on the orientation of the genes).

[0229] The genetic elements or genes located on a single chromosome segment are physically linked. In some embodiments, the two loci are located in close proximity such that recombination between homologous chromosome pairs does not occur between the two loci during meiosis with high frequency, e.g., such that linked loci co-segregate at least about 90% of the time, e.g., 91%, 92%, 93%, 94%, 95%, 96%, 97%, 98%, 99%, 99.5%, 99.75%, or more of the time. The genetic elements located within a chromosomal segment are also “genetically linked”, typically within a genetic recombination distance of less than or equal to 50 cM, e.g., about 49, 48, 47, 46, 45, 44, 43, 42, 41, 40, 39, 38, 37, 36, 35, 34, 33, 32, 31, 30, 29, 28, 27, 26, 25, 24, 23, 22, 21, 20, 19, 18, 17, 16, 15, 14, 13, 12, 11, 10, 9, 8, 7, 6, 5, 4, 3, 2, 1, 0.75, 0.5, 0.25 cM or less. That is, two genetic elements within a single chromosomal segment undergo recombination during meiosis with each other at a frequency of less than or equal to about 50%, e.g., about 49%, 48%, 47%, 46%, 45%, 44%, 43%, 42%, 41%, 40%, 39%, 38%, 37%, 36%, 35%, 34%, 33%, 32%, 31%, 30%, 29%, 28%, 27%, 26%, 25%, 24%, 23%, 22%, 21%, 20%, 19%, 18%, 17%, 16%, 15%, 14%, 13%, 12%, 11%, 10%, 9%, 8%, 7%, 6%, 5%, 4%, 3%, 2%, 1%, 0.75%, 0.5%, 0.25% or less. “Closely linked” markers display a cross over frequency with a given marker of about 10% or less, e.g., 9%, 8%, 7%, 6%, 5%, 4%, 3%, 2%, 1%, 0.75%, 0.5%, 0.25% or less (the given marker locus is within about 10 cM of a closely linked marker locus, e.g., 9, 8, 7, 6, 5, 4, 3, 2, 1, 0.75, 0.5, 0.25 cM or less of a closely linked marker locus). Put another way, closely linked marker loci co-segregate at least about 90% the time, e.g., 91%, 92%, 93%, 94%, 95%, 96%, 97%, 98%, 99%, 99.5%, 99.75%, or more of the time.

[0230] As used herein, the term “sequence identity” refers to the degree of identity between any given nucleic acid sequence and a target nucleic acid sequence. Percent sequence identity is calculated by determining the number of matched positions in aligned nucleic acid sequences, dividing the number of matched positions by the total number of aligned nucleotides, and multiplying by 100. A matched position refers to a position in which identical nucleotides occur at the same position in aligned nucleic acid sequences. Percent sequence identity also can be determined for any amino acid sequence. To determine percent sequence identity, a target nucleic acid or amino acid sequence is compared to the identified nucleic acid or amino acid sequence using the BLAST 2 Sequences (BI2seq) program from the stand-alone version of BLASTZ containing BLASTN and BLASTP. This stand-alone version of BLASTZ can be obtained from Fish & Richardson's web site (World Wide Web at fr.com/blast) or the U.S. government's National Center for Biotechnology Information web site (World Wide Web at ncbi.nlm.nih.gov). Instructions explaining how to use the BI2seq program can be found in the readme file accompanying BLASTZ. BI2seq performs a comparison between two sequences using either the BLASTN or BLASTP algorithm. Preferably, BLAST sequence alignments are performed according to the standard (i.e. default) settings (i.e. at the filing date of the present application).

[0231] BLASTN is used to compare nucleic acid sequences, while BLASTP is used to compare amino acid sequences. To compare two nucleic acid sequences, the options are set as follows: −i is set to a file containing the first nucleic acid sequence to be compared (e.g., C:\seq I.txt); −j is set to a file containing the second nucleic acid sequence to be compared (e.g., C:\seq2.txt); −p is set to blastn; −o is set to any desired file name (e.g., C:\output.txt); −q is set to −1; −r is set to 2; and all other options are left at their default setting. The following command will generate an output file containing a comparison between two sequences: C:\B12seq −i c:\seql.txt −j c:\seq2.txt −p blastn −o c:\output.txt −q −1 −r 2. If the target sequence shares homology with any portion of the identified sequence, then the designated output file will present those regions of homology as aligned sequences. If the target sequence does not share homology with any portion of the identified sequence, then the designated output file will not present aligned sequences. Once aligned, a length is determined by counting the number of consecutive nucleotides from the target sequence presented in alignment with the sequence from the identified sequence starting with any matched position and ending with any other matched position. A matched position is any position where an identical nucleotide is presented in both the target and identified sequences. Gaps presented in the target sequence are not counted since gaps are not nucleotides. Likewise, gaps presented in the identified sequence are not counted since target sequence nucleotides are counted, not nucleotides from the identified sequence. The percent identity over a particular length is determined by counting the number of matched positions over that length and dividing that number by the length followed by multiplying the resulting value by 100. For example, if (i) a 500-base nucleic acid target sequence is compared to a subject nucleic acid sequence, (ii) the BI2seq program presents 200 bases from the target sequence aligned with a region of the subject sequence where the first and last bases of that 200-base region are matches, and (iii) the number of matches over those 200 aligned bases is 180, then the 500-base nucleic acid target sequence contains a length of 200 and a sequence identity over that length of 90% (i.e., 180/200×100=90). It will be appreciated that different regions within a single nucleic acid target sequence that aligns with an identified sequence can each have their own percent identity. It is noted that the percent identity value is rounded to the nearest tenth. For example, 78.11, 78.12, 78.13, and 78.14 are rounded down to 78.1, while 78.15, 78.16, 78.17, 78.18, and 78.19 are rounded up to 78.2. It also is noted that the length value will always be an integer.

[0232] The term “sequence” when used herein relates to nucleotide sequence(s), polynucleotide(s), nucleic acid sequence(s), nucleic acid(s), nucleic acid molecule, peptides, polypeptides and proteins, depending on the context in which the term “sequence” is used. The terms “polynucleic acid”, “nucleotide sequence(s)”, “polynucleotide(s)”, “nucleic acid sequence(s)”, “nucleic acid(s)”, “nucleic acid molecule” are used interchangeably herein and refer to nucleotides, either ribonucleotides or deoxyribonucleotides or a combination of both, in a polymeric unbranched form of any length. Nucleic acid sequences include DNA, cDNA, genomic DNA, RNA, synthetic forms and mixed polymers, both sense and antisense strands, or may contain non-natural or derivatized nucleotide bases, as will be readily appreciated by those skilled in the art.

[0233] An “isolated nucleic acid sequence”, “isolated polynucleic acid” or “isolated DNA” refers to a nucleic acid sequence which is no longer in the natural environment from which it was isolated, e.g. the nucleic acid sequence in a bacterial host cell or in the plant nuclear or plastid genome. When referring to a “sequence” herein, it is understood that the molecule having such a sequence is referred to, e.g. the nucleic acid molecule. A “host cell” or a “recombinant host cell” or “transformed cell” are terms referring to a new individual cell (or organism) arising as a result of at least one nucleic acid molecule, having been introduced into said cell. The host cell is preferably a plant cell or a bacterial cell. The host cell may contain the nucleic acid as an extra-chromosomally (episomal) replicating molecule, or comprises the nucleic acid integrated in the nuclear or plastid genome of the host cell, or as introduced chromosome, e.g. minichromosome.

[0234] When reference is made to a nucleic acid sequence (e.g. DNA or genomic DNA) having “substantial sequence identity to” a reference sequence or having a sequence identity of at least 80%>, e.g. at least 85%, 90%, 95%, 98%> or 99%>nucleic acid sequence identity to a reference sequence, in one embodiment said nucleotide sequence is considered substantially identical to the given nucleotide sequence and can be identified using hybridisation conditions. In another embodiment, the nucleic acid sequence comprises one or more mutations compared to the given nucleotide sequence but still can be identified using stringent hybridisation conditions. “Stringent hybridisation conditions” can be used to identify nucleotide sequences, which are substantially identical to a given nucleotide sequence. Stringent conditions are sequence dependent and will be different in different circumstances. Generally, stringent conditions are selected to be about 5° C. lower than the thermal melting point (Tm) for the specific sequences at a defined ionic strength and pH. The Tm is the temperature (under defined ionic strength and pH) at which 50% of the target sequence hybridises to a perfectly matched probe. Typically, stringent conditions will be chosen in which the salt concentration is about 0.02 molar at pH 7 and the temperature is at least 60° C. Lowering the salt concentration and/or increasing the temperature increases stringency. Stringent conditions for RNA-DNA hybridisations (Northern blots using a probe of e.g. 100 nt) are for example those which include at least one wash in 0.2×SSC at 63° C. for 20 min, or equivalent conditions. Stringent conditions for DNA-DNA hybridisation (Southern blots using a probe of e.g. 100 nt) are for example those which include at least one wash (usually 2) in 0.2×SSC at a temperature of at least 50° C., usually about 55° C., for 20 min, or equivalent conditions. See also Sambrook et al. (1989) and Sambrook and Russell (2001). Examples of high stringent hybridization conditions are conditions under which primarily only those nucleic acid molecules that have at least 90% or at least 95% sequence identity undergo hybridization. Such high stringent hybridization conditions are, for example: 4×SSC at 65° C. and subsequent multiple washes in 0.1×SSC at 65° C. for approximately 1 hour. The term “high stringent hybridization conditions” as used herein may also mean: hybridization at 68° C. in 0.25 M sodium phosphate, pH 7.2, 7% SDS, 1 mM EDTA and 1% BSA for 16 hours and subsequently washing twice with 2×SSC and 0.1% SDS at 68° C. Preferably, hybridization takes place under stringent conditions. Less stringent hybridization conditions are, for example: hybridizing in 4×SSC at 37° C. and subsequent multiple washing in 1×SSC at room temperature.

[0235] It will be understood that “specifically hybridizing” means that the polynucleic acid hybridises with the (molecular) marker allele (such as under stringent hybridisation conditions, as defined herein elsewhere), but does not (substantially) hybridise with a polynucleic acid not comprising the marker allele or is (substantially) incapable of being used as a PCR primer. By means of example, in a suitable readout, the hybridization signal with the marker allele or PCR amplification of the marker allele is at least 5 times, preferably at least 10 times stronger or more than the hybridisation signal with a non-marker allele, or any other sequence.

[0236] When used herein, the term “polypeptide” or “protein” (both terms are used interchangeably herein) means a peptide, a protein, or a polypeptide which encompasses amino acid chains of a given length, wherein the amino acid residues are linked by covalent peptide bonds. However, peptidomimetics of such proteins/polypeptides wherein amino acid(s) and/or peptide bond(s) have been replaced by functional analogs are also encompassed by the invention as well as other than the 20 gene-encoded amino acids, such as selenocysteine. Peptides, oligopeptides and proteins may be termed polypeptides. The term polypeptide also refers to, and does not exclude, modifications of the polypeptide, e.g., glycosylation, acetylation, phosphorylation and the like. Such modifications are well described in basic texts and in more detailed monographs, as well as in the research literature.

[0237] Amino acid substitutions encompass amino acid alterations in which an amino acid is replaced with a different naturally-occurring amino acid residue. Such substitutions may be classified as “conservative<1>, in which an amino acid residue contained in the wild-type protein is replaced with another naturally-occurring amino acid of similar character, for example Gly<→Ala, Val<→Ile<→Leu, Asp<→-Glu, Lys<→Arg, Asn<→Gln or Phe<→Trp<→Tyr. Substitutions encompassed by the present invention may also be “non-conservative”, in which an amino acid residue which is present in the wild-type protein is substituted with an amino acid with different properties, such as a naturally-occurring amino acid from a different group (e.g. substituting a charged or hydrophobic amino acid with alanine. “Similar amino acids”, as used herein, refers to amino acids that have similar amino acid side chains, i.e. amino acids that have polar, non-polar or practically neutral side chains. “Non-similar amino acids”, as used herein, refers to amino acids that have different amino acid side chains, for example an amino acid with a polar side chain is non-similar to an amino acid with a non-polar side chain. Polar side chains usually tend to be present on the surface of a protein where they can interact with the aqueous environment found in cells (“hydrophilic” amino acids). On the other hand, “non-polar” amino acids tend to reside within the center of the protein where they can interact with similar non-polar neighbours (“hydrophobic” amino acids”). Examples of amino acids that have polar side chains are arginine, asparagine, aspartate, cysteine, glutamine, glutamate, histidine, lysine, serine, and threonine (all hydrophilic, except for cysteine which is hydrophobic). Examples of amino acids that have non-polar side chains are alanine, glycine, isoleucine, leucine, methionine, phenylalanine, proline, and tryptophan (all hydrophobic, except for glycine which is neutral).

[0238] The term “gene” when used herein refers to a polymeric form of nucleotides of any length, either ribonucleotides or desoxyribonucleotides. The term includes double- and single-stranded DNA and RNA. It also includes known types of modifications, for example, methylation, “caps”, substitutions of one or more of the naturally occurring nucleotides with an analog. Preferably, a gene comprises a coding sequence encoding the herein defined polypeptide. A “coding sequence” is a nucleotide sequence which is transcribed into mRNA and/or translated into a polypeptide when placed or being under the control of appropriate regulatory sequences. The boundaries of the coding sequence are determined by a translation start codon at the 5′-terminus and a translation stop codon at the 3′-terminus. A coding sequence can include, but is not limited to mRNA, cDNA, recombinant nucleic acid sequences or genomic DNA, while introns may be present as well under certain circumstances.

[0239] As used herein, the term “endogenous” refers to a gene or allele which is present in its natural genomic location. The term “endogenous” can be used interchangeably with “native” or “wild-type”. This does not however exclude the presence of one or more nucleic acid differences with the wild-type allele. In particular embodiments, the difference with a wild-type allele can be limited to less than 9 preferably less than 6, more particularly less than 3 nucleotide differences, such as 0 nucleotides difference. More particularly, the difference with the wildtype sequence can be in only one nucleotide. Preferably, the endogenous allele encodes a modified protein having less than 9, preferably less than 6, more particularly less than 3 and even more preferably only one or no amino acid difference with the wild-type protein.

[0240] A used herein, the term “exogenous polynucleotide” refers to a polynucleotide, such as a gene (or cDNA) or allele which is or has been recombinantly introduced in a cell (or plant). The exogenous polynucleotide may be episomal or genomically integrated. Integration may be random or site-directed. Integration may include replacement of a corresponding endogenous polynucleotide. It will be understood that an exogenous polynucleotide is not naturally present in the cell or plant.

[0241] The term “hybrid”, “hybrid plant”, or hybrid seed” as used in the context of the present invention has its ordinary meaning known in the art. By means of further guidance, and without limitation in the context of the present invention this term refers to the offspring of two (genetically distinct or different) parent plants, which may be different plant lines, cultivars, or varieties. It will be understood that according to the present invention, the parents of a hybrid plant preferably are from the same genus, preferably the same species. Preferably, the parents of a hybrid each are stable populations, having a high degree of homozygosity. The parents typically differ from each other in one or more traits or (agronomic, physiologic, or quality) characteristics. The hybrid therefore typically is heterozygous for such trait or (agronomic, physiologic, or quality) characteristic. According to the present invention, hybrids preferably are the F1 hybrids, i.e. the first generation of offspring resulting from the two parents (e.g. the two parental lines, cultivars, or varieties). The seed produced by crossing two parents is therefore the F1 hybrid seed.

[0242] As used herein, the term “male sterile” plant (line, cultivar, or variety) has its ordinary meaning in the art. By means of further guidance, and without limitation, the term refers to a plant which is unable to produce offspring as a pollen donor, and may result from the failure to produce (functional) anthers, pollen, or gametes, in particular male gametes. Cytoplasmic male sterile plants have cytoplasmic genes, usually in the mitochondria, that encode factors that disrupt or prevent pollen development, making them male-sterile, with male sterility inherited maternally. The utilization of cytoplasmic male sterility for hybrid seed production requires three separate plant lines: the male-sterile line, an isogeneic male-fertile line for propagation (“maintainer line”) and a line for restoring fertility to the hybrid so that it can produce seed (“restorer line”). The male-sterile line is used as the receptive parent in a hybrid cross, the maintainer line is genetically identical to the male-sterile line, excepting that it lacks the cytoplasmic sterility factors, and the restorer line is any line that masks the cytoplasmic sterility factor. The restorer line is very important for those plants, such as grain sorghum or cotton, the useful crop of which is the seed itself or seed-associated structures. Genetic male sterility is similar to cytoplasmic male sterility but differs in that the sterility factors are encoded in nuclear DNA. Typically, genetic male sterility refers to a change in a plant's genetic structure which results in its ability to produce and/or spread viable pollen. Genetic male sterile plant lines may occur naturally. It is also possible to create a male-sterile plant line (in particular a genetic male sterile plant line) using recombinant techniques. Whether naturally occurring or transgenic, male-sterile lines (in particular genetic male sterile plant lines) still require the use of a sister maintainer line for their propagation, which of necessity leads to a minimum of 50% male-fertile plants in propagated seed. This is a result of the genetics of male-sterility and maintainer lines. If the male-sterility factor is recessive, as most are, a male-sterile plant would have to be homozygous recessive in order to display the trait. Preferably, according to the invention male sterility refers to genetic male sterility. Preferably, according to the invention male sterility is not or does not encompass cytoplasmic male sterility.

[0243] As used herein, the terms “phenotype,” “phenotypic trait” or “trait” refer to one or more traits of a plant or plant cell. The phenotype can be observable to the naked eye, or by any other means of evaluation known in the art, e.g., microscopy, biochemical analysis, or an electromechanical assay. In some cases, a phenotype is directly controlled by a single gene or genetic locus (i.e., corresponds to a “single gene trait”). In the case of genetic male or female sterility, a linked gene may confer an easily identifiable phenotype, such as dwarfism, associated with the genetic male or female sterility. Identification of dwarfism can then be used as a proxy for (i.e. in lieu of) identification of genetic male or female sterility.

[0244] As used herein, the term “dwarfism” or “dwarf” has its ordinary meaning known in the art. By means of further guidance, and without limitation, the term dwarfism/dwarf/etc. refers to plants or plant parts having a reduced size compared to plant not having dwarfism. The skilled person will understand that a reduced size preferably refers to an average reduced size, i.e. based on a population of plants or plant parts. Due to natural variation (for instance also subject to weather or climatological conditions, as well as geographical conditions) by chance a small plant lacking dwarfism-causing genes or mutations may be smaller than a tall plant comprising dwarfism-causing genes or mutations. However, the selection of small plants or plant parts will in any case result in a large proportion of plants or plant parts having dwarfism-causing genes or mutations. Accordingly, selection of for instance the 25% smallest plants or plant parts (e.g. resulting from a cross between heterozygous Dwarf11 plants) will ensure selection or enrichment of substantially more than 50%, such as at least 65% or at least at least 75%, preferably at least 80%, more preferably at least 85%, such as at least 90% plants or plant parts having dwarfism-causing genes or mutations. “Dwarfism” as used herein may manifest as a reduced plant height, but may also manifest in smaller seed or grain size.

[0245] A reduced (average and/or maximum) size as used herein, may mean for instance a reduced (average and/or maximum) plant height (i.e. compared to (average and/or maximum) size or plant height of plants not having dwarfism). The skilled person will understand that size is determined and compared in a comparable context, such as at comparable developmental stage, e.g. mature plants or seeds. For seeds or grains, a reduced (average and/or maximum) size may for instance mean a reduced (average and/or maximum) length and/or a reduced (average and/or maximum) width and/or reduced (average and/or maximum) thickness, and/or circumference, and/or diameter, and/or volume, and/or weight, etc. Seed length may be determined as the maximum seed length of a seed under measurement, usually the longest axis of the seed. Seed width may be determined as the maximum seed width of a seed under measurement, usually the second longest axis, perpendicular or nearly so to the length axis. Seed thickness may be determined as the maximum seed thickness under measurement, usually the third longest axis, if needed. Seed sorting based on size may for instance be performed by sieving. A reduced (average and/or maximum) seed or grain size generally results in a reduced (average and/or maximum) seed or grain weight. Accordingly, a reduced (average and/or maximum) seed or grain size may advantageously be expressed as seeds or grains having a reduced 1000 kernel weight (e.g. expressed as the weight in gram of 1000 seeds).

[0246] In certain embodiments, dwarfism means a (average) reduction in plant height of at least 5%, preferably at least 8%, more preferably at least 10%. In certain embodiments, dwarfism means a (average) reduction in seed length of at least 5%, preferably at least 8%, more preferably at least 10%. In certain embodiments, dwarfism means a (average) reduction in 1000 kernel weight of at least 4%, preferably at least 6%, more preferably at least 8%.

[0247] “Myb80” (previously also known as Myb103) as used herein is an anther specific expressed gene. Mutants of this gene are known in other plant species and cause a male sterile phenotype. The Arabidopsis ortholog AtMyb80 (previously also known as AtMyb103) plays an important role in tapetum development, callose dissolution and exine formation in Arabidopsis thaliana anthers (Li S F, Higginson T, Parish R W: A novel MYB-related gene from Arabidopsis thaliana expressed in developing anthers. Plant Cell Physiol. 1999, 40:343-347. Higginson T, Li S F, Parish R W: AtMYB103 regulates tapetum and trichome development in Arabidopsis thaliana. Plant J. 2003, 35:177-192. Zhang Z B, Zhu J, Gao J F, Wang C, Li H, Li H, Zhang H Q, Zhang S, Wang D M, Wang Q X, Huang H, Xia H J, Yang Z N: Transcription factor AtMYB103 is required for anther development by regulating tapetum development, callose dissolution and exine formation in Arabidopsis. Plant J. 2007, 52:528-538. Phan H A, lacuone S, Li S F, Parish R W: The MYB80 transcription factor is required for pollen development and the regulation of tapetal programmed cell death in Arabidopsis thaliana. Plant Cell. 2011, 23:2209-2224. Phan H A, Li S F, Parish R W: MYB80, a regulator of tapetal and pollen development, is functionally conserved in crops. Plant Mol Biol. 2012, 78:171-183. Xu, Y., lacuone, S., Li, S. F. et al. MYB80 homologues in Arabidopsis, cotton and Brassica: regulation and functional conservation in tapetal and pollen development. BMC Plant Biol 14, 278 (2014)). Reduction of the expression of AtMyb80 in transgenic Arabidopsis plants via a co-suppression approach results in a reduced viability and fertility of the pollen produced from these plants (Higginson T, Li S F, Parish R W: AtMYB103 regulates tapetum and trichome development in Arabidopsis thaliana. Plant J. 2003, 35:177-192.). In rice an EMS based mutant was identified, where an amino acid exchange (E to K) caused a male sterile phenotype (Yan et al. (2017) Simultaneous Identification of Multiple Causal Mutations in Rice. Front. Plant Sci, doi:10.3389/fpls.2016.02055). A representative sequence of Oryza sativa (subsp. Japonica) Myb80 (OsMyb80) can be found in the Plant Transcription Factor Database as ID LOC_Os04g39470.1 (http://planttfdb.gao-lab.org/tf.php?sp=Osj&did=LOC_Os04g39470.1). A representative sequence of Arabidopsis thaliana Myb80 (AtMyb80) can be found in The Arabidopsis Information Resource (tair) as locus AT5G56110.1 (https://www.arabidopsis.org/servlets/TairObject?type=locus&name=At5g56110). In certain embodiments, the Oryza sativa orthologue of Myb80 has a coding sequence as set forth in SEQ ID NO: 1. Additional sequences are provided in Table 3. The skilled person will understand that orthologues from different species and genera can be identified based on sequence alignment, such as BLAST analysis, as described herein elsewhere.

[0248] “Dwarf11” (also called CYP724B1, D11, GNS4, or PMM1) as used herein refers to an enzyme involved in the production of brassinosteroid plant hormones. The mutant plants show a dwarf phenotype but more important also a small grain phenotype in rice. Rice plants with reduced expression of this gene show a dwarf phenotype (only approx . . . 87% of the height of a wt plant) and the average seed length is only 87% of the wt plants, whereas the seed width is not affected (Zhou, Y., Tao, Y., Zhu, J. et al. GNS4, a novel allele of DWARF11, regulates grain number and grain size in a high-yield rice variety. Rice 10, 34 (2017)). Due to this mutant phenotype, the seeds are rounder, have a different shape. This shape difference can be used to separate wt seeds from mutant seeds on specific sieves. Additionally, there are weight differences describe. The thousand kernel weight of the mutant seeds is 9.4% lower. Also this weight difference can be used in a seed purification process to separate wt seeds from mutant seeds. Due to the fact that the gene responsible for the phenotype is known, specific molecular markers can be developed for the detection of the specific mutations in the plants. Therefore, pure population of mutant seeds can be generated to calibrate the seed purification process. In certain embodiments, the Oryza sativa orthologue of Dwarf11 has a coding sequence as set forth in SEQ ID NO: 4. Additional sequences are provided in Table 3. The skilled person will understand that orthologues from different species and genera can be identified based on sequence alignment, such as BLAST analysis, as described herein elsewhere.

[0249] In a preferred embodiment, the zygosity of the gene pair according to the invention, such as the Myb80 gene and the Dwarf11 gene, is the same, i.e. both comprise a homozygous mutation or both comprise a heterozygous mutation, or alternatively both are wild type (i.e. do not comprise a mutation of the invention).

[0250] In an aspect, the invention relates to a method for generating or modifying a plant or plant part, comprising
[0251] a) providing a plant or plant part not expressing or having reduced expression, activity, and/or stability of the Myb80 gene product;
[0252] b) reducing or eliminating expression, activity, and/or stability of the Dwarf11 gene product in said plant or plant part.

[0253] In an aspect, the invention relates to a method for generating or modifying a plant or plant part, comprising
[0254] a) providing a plant or plant part not expressing or having reduced expression, activity, and/or stability of the Myb80 gene product; and/or having a mutation in the Myb80 gene or regulatory sequence thereof;
[0255] b) reducing or eliminating expression, activity, and/or stability of the Dwarf11 gene product in said plant or plant part; and/or introducing a mutation in the Dwarf11 gene or regulatory sequence thereof.

[0256] In an aspect, the invention relates to a method for generating or modifying a plant or plant part, comprising
[0257] a) providing a plant or plant part not expressing or having reduced expression, activity, and/or stability of the Myb80 gene product and or by having a mutation in the Myb80 gene or regulatory sequence thereof;
[0258] b) reducing or eliminating expression, activity, and/or stability of the Dwarf11 gene product in said plant or plant part and or by introducing a mutation in the Dwarf11 gene or regulatory sequence thereof.

[0259] In an aspect, the invention relates to a method for generating or modifying a plant or plant part, comprising
[0260] a) providing a plant or plant part having a mutation in the Myb80 gene or regulatory sequence thereof;
[0261] b) introducing a mutation in the Dwarf11 gene or regulatory sequence thereof.

[0262] In an aspect, the invention relates to a method for generating or modifying a plant or plant part, comprising
[0263] a) providing a plant or plant part having a mutation in the Myb80 gene or regulatory sequence thereof, thereby reducing or eliminating the expression, activity, and/or stability of the Myb80 gene product;
[0264] b) introducing a mutation in the Dwarf11 gene or regulatory sequence thereof, thereby reducing or eliminating the expression, activity, and/or stability of the Dwarf11 gene product.

[0265] In an aspect, the invention relates to a method for generating or modifying a plant or plant part, comprising
[0266] a) providing a plant or plant part not expressing or having reduced expression, activity, and/or stability of the Myb80 gene product;
[0267] b) introducing a mutation in the Dwarf11 gene or regulatory sequence thereof.

[0268] In an aspect, the invention relates to a method for generating or modifying a plant or plant part, comprising
[0269] a) providing a plant or plant part having a mutation in the Myb80 gene or regulatory sequence thereof;
[0270] b) reducing or eliminating expression, activity, and/or stability of the Dwarf11 gene product in said plant or plant part.

[0271] In an aspect, the invention relates to a method for generating or modifying a plant or plant part, comprising
[0272] a) providing a plant or plant part not expressing or having reduced expression, activity, and/or stability of the Myb80 gene product; and/or having a mutation in the Myb80 gene or regulatory sequence thereof;
[0273] b) reducing or eliminating expression, activity, and/or stability of the Dwarf11 gene product in said plant or plant part; and/or introducing a homozygous mutation in the Dwarf11 gene or regulatory sequence thereof.

[0274] In an aspect, the invention relates to a method for generating or modifying a plant or plant part, comprising
[0275] a) providing a plant or plant part not expressing or having reduced expression, activity, and/or stability of the Myb80 gene product and or by having a mutation in the Myb80 gene or regulatory sequence thereof;
[0276] b) reducing or eliminating expression, activity, and/or stability of the Dwarf11 gene product in said plant or plant part and or by introducing a homozygous mutation in the Dwarf11 gene or regulatory sequence thereof.

[0277] In an aspect, the invention relates to a method for generating or modifying a plant or plant part, comprising
[0278] a) providing a plant or plant part having a mutation in the Myb80 gene or regulatory sequence thereof;
[0279] b) introducing a homozygous mutation in the Dwarf11 gene or regulatory sequence thereof.

[0280] In an aspect, the invention relates to a method for generating or modifying a plant or plant part, comprising
[0281] a) providing a plant or plant part having a mutation in the Myb80 gene or regulatory sequence thereof, thereby reducing or eliminating the expression, activity, and/or stability of the Myb80 gene product;
[0282] b) introducing a homozygous mutation in the Dwarf11 gene or regulatory sequence thereof, thereby reducing or eliminating the expression, activity, and/or stability of the Dwarf11 gene product.

[0283] In an aspect, the invention relates to a method for generating or modifying a plant or plant part, comprising
[0284] a) providing a plant or plant part not expressing or having reduced expression, activity, and/or stability of the Myb80 gene product;
[0285] b) introducing a homozygous mutation in the Dwarf11 gene or regulatory sequence thereof.

[0286] In an aspect, the invention relates to a method for generating or modifying a plant or plant part, comprising
[0287] a) providing a plant or plant part having a mutation in the Myb80 gene or regulatory sequence thereof;
[0288] b) reducing or eliminating expression, activity, and/or stability of the Dwarf11 gene product in said plant or plant part.

[0289] In an aspect, the invention relates to a method for generating or modifying a plant or plant part, comprising
[0290] a) providing a plant or plant part not expressing or having reduced expression, activity, and/or stability of the Myb80 gene product; and/or having a mutation in the Myb80 gene or regulatory sequence thereof;
[0291] b) reducing or eliminating expression, activity, and/or stability of the Dwarf11 gene product in said plant or plant part; and/or introducing a heterozygous mutation in the Dwarf11 gene or regulatory sequence thereof.

[0292] In an aspect, the invention relates to a method for generating or modifying a plant or plant part, comprising
[0293] a) providing a plant or plant part not expressing or having reduced expression, activity, and/or stability of the Myb80 gene product and or by having a mutation in the Myb80 gene or regulatory sequence thereof;
[0294] b) reducing or eliminating expression, activity, and/or stability of the Dwarf11 gene product in said plant or plant part and or by introducing a heterozygous mutation in the Dwarf11 gene or regulatory sequence thereof.

[0295] In an aspect, the invention relates to a method for generating or modifying a plant or plant part, comprising
[0296] a) providing a plant or plant part having a mutation in the Myb80 gene or regulatory sequence thereof;
[0297] b) introducing a heterozygous mutation in the Dwarf11 gene or regulatory sequence thereof.

[0298] In an aspect, the invention relates to a method for generating or modifying a plant or plant part, comprising
[0299] a) providing a plant or plant part having a mutation in the Myb80 gene or regulatory sequence thereof, thereby reducing or eliminating the expression, activity, and/or stability of the Myb80 gene product;
[0300] b) introducing a heterozygous mutation in the Dwarf11 gene or regulatory sequence thereof, thereby reducing or eliminating the expression, activity, and/or stability of the Dwarf11 gene product.

[0301] In an aspect, the invention relates to a method for generating or modifying a plant or plant part, comprising
[0302] a) providing a plant or plant part not expressing or having reduced expression, activity, and/or stability of the Myb80 gene product;
[0303] b) introducing a heterozygous mutation in the Dwarf11 gene or regulatory sequence thereof.

[0304] In an aspect, the invention relates to a method for generating or modifying a plant or plant part, comprising
[0305] a) providing a plant or plant part having a mutation in the Myb80 gene or regulatory sequence thereof;
[0306] b) reducing or eliminating expression, activity, and/or stability of the Dwarf11 gene product in said plant or plant part.

[0307] In an aspect, the invention relates to a method for generating or modifying a plant or plant part, comprising
[0308] a) providing a plant or plant part not expressing or having reduced expression, activity, and/or stability of the Myb80 gene product; and/or having a homozygous mutation in the Myb80 gene or regulatory sequence thereof;
[0309] b) reducing or eliminating expression, activity, and/or stability of the Dwarf11 gene product in said plant or plant part; and/or introducing a homozygous mutation in the Dwarf11 gene or regulatory sequence thereof.

[0310] In an aspect, the invention relates to a method for generating or modifying a plant or plant part, comprising
[0311] a) providing a plant or plant part not expressing or having reduced expression, activity, and/or stability of the Myb80 gene product and or by having a homozygous mutation in the Myb80 gene or regulatory sequence thereof;
[0312] b) reducing or eliminating expression, activity, and/or stability of the Dwarf11 gene product in said plant or plant part and or by introducing a homozygous mutation in the Dwarf11 gene or regulatory sequence thereof.

[0313] In an aspect, the invention relates to a method for generating or modifying a plant or plant part, comprising
[0314] a) providing a plant or plant part having a homozygous mutation in the Myb80 gene or regulatory sequence thereof;
[0315] b) introducing a homozygous mutation in the Dwarf11 gene or regulatory sequence thereof.

[0316] In an aspect, the invention relates to a method for generating or modifying a plant or plant part, comprising
[0317] a) providing a plant or plant part having a homozygous mutation in the Myb80 gene or regulatory sequence thereof, thereby reducing or eliminating the expression, activity, and/or stability of the Myb80 gene product;
[0318] b) introducing a homozygous mutation in the Dwarf11 gene or regulatory sequence thereof, thereby reducing or eliminating the expression, activity, and/or stability of the Dwarf11 gene product.

[0319] In an aspect, the invention relates to a method for generating or modifying a plant or plant part, comprising
[0320] a) providing a plant or plant part not expressing or having reduced expression, activity, and/or stability of the Myb80 gene product;
[0321] b) introducing a homozygous mutation in the Dwarf11 gene or regulatory sequence thereof.

[0322] In an aspect, the invention relates to a method for generating or modifying a plant or plant part, comprising
[0323] a) providing a plant or plant part having a homozygous mutation in the Myb80 gene or regulatory sequence thereof;
[0324] b) reducing or eliminating expression, activity, and/or stability of the Dwarf11 gene product in said plant or plant part.

[0325] In an aspect, the invention relates to a method for generating or modifying a plant or plant part, comprising
[0326] a) providing a plant or plant part not expressing or having reduced expression, activity, and/or stability of the Myb80 gene product; and/or having a homozygous mutation in the Myb80 gene or regulatory sequence thereof;
[0327] b) reducing or eliminating expression, activity, and/or stability of the Dwarf11 gene product in said plant or plant part; and/or introducing a heterozygous mutation in the Dwarf11 gene or regulatory sequence thereof.

[0328] In an aspect, the invention relates to a method for generating or modifying a plant or plant part, comprising
[0329] a) providing a plant or plant part not expressing or having reduced expression, activity, and/or stability of the Myb80 gene product and or by having a homozygous mutation in the Myb80 gene or regulatory sequence thereof;
[0330] b) reducing or eliminating expression, activity, and/or stability of the Dwarf11 gene product in said plant or plant part and or by introducing a heterozygous mutation in the Dwarf11 gene or regulatory sequence thereof.

[0331] In an aspect, the invention relates to a method for generating or modifying a plant or plant part, comprising
[0332] a) providing a plant or plant part having a homozygous mutation in the Myb80 gene or regulatory sequence thereof;
[0333] b) introducing a heterozygous mutation in the Dwarf11 gene or regulatory sequence thereof.

[0334] In an aspect, the invention relates to a method for generating or modifying a plant or plant part, comprising
[0335] a) providing a plant or plant part having a homozygous mutation in the Myb80 gene or regulatory sequence thereof, thereby reducing or eliminating the expression, activity, and/or stability of the Myb80 gene product;
[0336] b) introducing a heterozygous mutation in the Dwarf11 gene or regulatory sequence thereof, thereby reducing or eliminating the expression, activity, and/or stability of the Dwarf11 gene product.

[0337] In an aspect, the invention relates to a method for generating or modifying a plant or plant part, comprising
[0338] a) providing a plant or plant part not expressing or having reduced expression, activity, and/or stability of the Myb80 gene product;
[0339] b) introducing a heterozygous mutation in the Dwarf11 gene or regulatory sequence thereof.

[0340] In an aspect, the invention relates to a method for generating or modifying a plant or plant part, comprising
[0341] a) providing a plant or plant part having a homozygous mutation in the Myb80 gene or regulatory sequence thereof;
[0342] b) reducing or eliminating expression, activity, and/or stability of the Dwarf11 gene product in said plant or plant part.

[0343] In an aspect, the invention relates to a method for generating or modifying a plant or plant part, comprising
[0344] a) providing a plant or plant part not expressing or having reduced expression, activity, and/or stability of the Myb80 gene product; and/or having a homozygous mutation in the Myb80 gene or regulatory sequence thereof;
[0345] b) reducing or eliminating expression, activity, and/or stability of the Dwarf11 gene product in said plant or plant part; and/or introducing a mutation in the Dwarf11 gene or regulatory sequence thereof.

[0346] In an aspect, the invention relates to a method for generating or modifying a plant or plant part, comprising
[0347] a) providing a plant or plant part not expressing or having reduced expression, activity, and/or stability of the Myb80 gene product and or by having a homozygous mutation in the Myb80 gene or regulatory sequence thereof;
[0348] b) reducing or eliminating expression, activity, and/or stability of the Dwarf11 gene product in said plant or plant part and or by introducing a mutation in the Dwarf11 gene or regulatory sequence thereof.

[0349] In an aspect, the invention relates to a method for generating or modifying a plant or plant part, comprising
[0350] a) providing a plant or plant part having a homozygous mutation in the Myb80 gene or regulatory sequence thereof;
[0351] b) introducing a mutation in the Dwarf11 gene or regulatory sequence thereof.

[0352] In an aspect, the invention relates to a method for generating or modifying a plant or plant part, comprising
[0353] a) providing a plant or plant part having a homozygous mutation in the Myb80 gene or regulatory sequence thereof, thereby reducing or eliminating the expression, activity, and/or stability of the Myb80 gene product;
[0354] b) introducing a mutation in the Dwarf11 gene or regulatory sequence thereof, thereby reducing or eliminating the expression, activity, and/or stability of the Dwarf11 gene product.

[0355] In an aspect, the invention relates to a method for generating or modifying a plant or plant part, comprising
[0356] a) providing a plant or plant part not expressing or having reduced expression, activity, and/or stability of the Myb80 gene product;
[0357] b) introducing a mutation in the Dwarf11 gene or regulatory sequence thereof.

[0358] In an aspect, the invention relates to a method for generating or modifying a plant or plant part, comprising
[0359] a) providing a plant or plant part having a homozygous mutation in the Myb80 gene or regulatory sequence thereof;
[0360] b) reducing or eliminating expression, activity, and/or stability of the Dwarf11 gene product in said plant or plant part.

[0361] In an aspect, the invention relates to a method for generating or modifying a plant or plant part, comprising
[0362] a) providing a plant or plant part not expressing or having reduced expression, activity, and/or stability of the Myb80 gene product; and/or having a heterozygous mutation in the Myb80 gene or regulatory sequence thereof;
[0363] b) reducing or eliminating expression, activity, and/or stability of the Dwarf11 gene product in said plant or plant part; and/or introducing a homozygous mutation in the Dwarf11 gene or regulatory sequence thereof.

[0364] In an aspect, the invention relates to a method for generating or modifying a plant or plant part, comprising
[0365] a) providing a plant or plant part not expressing or having reduced expression, activity, and/or stability of the Myb80 gene product and or by having a heterozygous mutation in the Myb80 gene or regulatory sequence thereof;
[0366] b) reducing or eliminating expression, activity, and/or stability of the Dwarf11 gene product in said plant or plant part and or by introducing a homozygous mutation in the Dwarf11 gene or regulatory sequence thereof.

[0367] In an aspect, the invention relates to a method for generating or modifying a plant or plant part, comprising
[0368] a) providing a plant or plant part having a heterozygous mutation in the Myb80 gene or regulatory sequence thereof;
[0369] b) introducing a homozygous mutation in the Dwarf11 gene or regulatory sequence thereof.

[0370] In an aspect, the invention relates to a method for generating or modifying a plant or plant part, comprising
[0371] a) providing a plant or plant part having a heterozygous mutation in the Myb80 gene or regulatory sequence thereof, thereby reducing or eliminating the expression, activity, and/or stability of the Myb80 gene product;
[0372] b) introducing a homozygous mutation in the Dwarf11 gene or regulatory sequence thereof, thereby reducing or eliminating the expression, activity, and/or stability of the Dwarf11 gene product.

[0373] In an aspect, the invention relates to a method for generating or modifying a plant or plant part, comprising
[0374] a) providing a plant or plant part not expressing or having reduced expression, activity, and/or stability of the Myb80 gene product;
[0375] b) introducing a homozygous mutation in the Dwarf11 gene or regulatory sequence thereof.

[0376] In an aspect, the invention relates to a method for generating or modifying a plant or plant part, comprising
[0377] a) providing a plant or plant part having a heterozygous mutation in the Myb80 gene or regulatory sequence thereof;
[0378] b) reducing or eliminating expression, activity, and/or stability of the Dwarf11 gene product in said plant or plant part.

[0379] In an aspect, the invention relates to a method for generating or modifying a plant or plant part, comprising
[0380] a) providing a plant or plant part not expressing or having reduced expression, activity, and/or stability of the Myb80 gene product; and/or having a heterozygous mutation in the Myb80 gene or regulatory sequence thereof;
[0381] b) reducing or eliminating expression, activity, and/or stability of the Dwarf11 gene product in said plant or plant part; and/or introducing a heterozygous mutation in the Dwarf11 gene or regulatory sequence thereof.

[0382] In an aspect, the invention relates to a method for generating or modifying a plant or plant part, comprising
[0383] a) providing a plant or plant part not expressing or having reduced expression, activity, and/or stability of the Myb80 gene product and or by having a heterozygous mutation in the Myb80 gene or regulatory sequence thereof;
[0384] b) reducing or eliminating expression, activity, and/or stability of the Dwarf11 gene product in said plant or plant part and or by introducing a heterozygous mutation in the Dwarf11 gene or regulatory sequence thereof.

[0385] In an aspect, the invention relates to a method for generating or modifying a plant or plant part, comprising
[0386] a) providing a plant or plant part having a heterozygous mutation in the Myb80 gene or regulatory sequence thereof;
[0387] b) introducing a heterozygous mutation in the Dwarf11 gene or regulatory sequence thereof.

[0388] In an aspect, the invention relates to a method for generating or modifying a plant or plant part, comprising
[0389] a) providing a plant or plant part having a heterozygous mutation in the Myb80 gene or regulatory sequence thereof, thereby reducing or eliminating the expression, activity, and/or stability of the Myb80 gene product;
[0390] b) introducing a heterozygous mutation in the Dwarf11 gene or regulatory sequence thereof, thereby reducing or eliminating the expression, activity, and/or stability of the Dwarf11 gene product.

[0391] In an aspect, the invention relates to a method for generating or modifying a plant or plant part, comprising
[0392] a) providing a plant or plant part not expressing or having reduced expression, activity, and/or stability of the Myb80 gene product;
[0393] b) introducing a heterozygous mutation in the Dwarf11 gene or regulatory sequence thereof.

[0394] In an aspect, the invention relates to a method for generating or modifying a plant or plant part, comprising
[0395] a) providing a plant or plant part having a heterozygous mutation in the Myb80 gene or regulatory sequence thereof;
[0396] b) reducing or eliminating expression, activity, and/or stability of the Dwarf11 gene product in said plant or plant part.

[0397] In an aspect, the invention relates to a method for generating or modifying a plant or plant part, comprising
[0398] a) providing a plant or plant part not expressing or having reduced expression, activity, and/or stability of the Myb80 gene product; and/or having a heterozygous mutation in the Myb80 gene or regulatory sequence thereof;
[0399] b) reducing or eliminating expression, activity, and/or stability of the Dwarf11 gene product in said plant or plant part; and/or introducing a mutation in the Dwarf11 gene or regulatory sequence thereof.

[0400] In an aspect, the invention relates to a method for generating or modifying a plant or plant part, comprising
[0401] a) providing a plant or plant part not expressing or having reduced expression, activity, and/or stability of the Myb80 gene product and or by having a heterozygous mutation in the Myb80 gene or regulatory sequence thereof;
[0402] b) reducing or eliminating expression, activity, and/or stability of the Dwarf11 gene product in said plant or plant part and or by introducing a mutation in the Dwarf11 gene or regulatory sequence thereof.

[0403] In an aspect, the invention relates to a method for generating or modifying a plant or plant part, comprising
[0404] a) providing a plant or plant part having a heterozygous mutation in the Myb80 gene or regulatory sequence thereof;
[0405] b) introducing a mutation in the Dwarf11 gene or regulatory sequence thereof.

[0406] In an aspect, the invention relates to a method for generating or modifying a plant or plant part, comprising
[0407] a) providing a plant or plant part having a heterozygous mutation in the Myb80 gene or regulatory sequence thereof, thereby reducing or eliminating the expression, activity, and/or stability of the Myb80 gene product;
[0408] b) introducing a mutation in the Dwarf11 gene or regulatory sequence thereof, thereby reducing or eliminating the expression, activity, and/or stability of the Dwarf11 gene product.

[0409] In an aspect, the invention relates to a method for generating or modifying a plant or plant part, comprising
[0410] a) providing a plant or plant part not expressing or having reduced expression, activity, and/or stability of the Myb80 gene product;
[0411] b) introducing a mutation in the Dwarf11 gene or regulatory sequence thereof.

[0412] In an aspect, the invention relates to a method for generating or modifying a plant or plant part, comprising
[0413] a) providing a plant or plant part having a heterozygous mutation in the Myb80 gene or regulatory sequence thereof;
[0414] b) reducing or eliminating expression, activity, and/or stability of the Dwarf11 gene product in said plant or plant part.

[0415] In an aspect, the invention relates to a method for generating or modifying a plant or plant part, comprising
[0416] a) providing a plant or plant part not expressing or having reduced expression, activity, and/or stability of the Dwarf11 gene product;
[0417] b) reducing or eliminating expression, activity, and/or stability of the Myb80 gene product in said plant or plant part.

[0418] In an aspect, the invention relates to a method for generating or modifying a plant or plant part, comprising
[0419] a) providing a plant or plant part not expressing or having reduced expression, activity, and/or stability of the Dwarf11 gene product; and/or having a mutation in the Dwarf11 gene or regulatory sequence thereof;
[0420] b) reducing or eliminating expression, activity, and/or stability of the Myb80 gene product in said plant or plant part; and/or introducing a mutation in the Myb80 gene or regulatory sequence thereof.

[0421] In an aspect, the invention relates to a method for generating or modifying a plant or plant part, comprising
[0422] a) providing a plant or plant part not expressing or having reduced expression, activity, and/or stability of the Dwarf11 gene product and/or by having a mutation in the Dwarf11 gene or regulatory sequence thereof;
[0423] b) reducing or eliminating expression, activity, and/or stability of the Myb80 gene product in said plant or plant part and or by introducing a mutation in the Myb80 gene or regulatory sequence thereof.

[0424] In an aspect, the invention relates to a method for generating or modifying a plant or plant part, comprising
[0425] a) providing a plant or plant part having a mutation in the Dwarf11 gene or regulatory sequence thereof;
[0426] b) introducing a mutation in the Myb80 gene or regulatory sequence thereof.

[0427] In an aspect, the invention relates to a method for generating or modifying a plant or plant part, comprising
[0428] a) providing a plant or plant part having a mutation in the Dwarf11 gene or regulatory sequence thereof, thereby reducing or eliminating the expression, activity, and/or stability of the Dwarf11 gene product;
[0429] b) introducing a mutation in the Myb80 gene or regulatory sequence thereof, thereby reducing or eliminating the expression, activity, and/or stability of the Myb80 gene product.

[0430] In an aspect, the invention relates to a method for generating or modifying a plant or plant part, comprising
[0431] a) providing a plant or plant part not expressing or having reduced expression, activity, and/or stability of the Dwarf11 gene product;
[0432] b) introducing a mutation in the Myb80 gene or regulatory sequence thereof.

[0433] In an aspect, the invention relates to a method for generating or modifying a plant or plant part, comprising
[0434] a) providing a plant or plant part having a mutation in the Dwarf11 gene or regulatory sequence thereof;
[0435] b) reducing or eliminating expression, activity, and/or stability of the Myb80 gene product in said plant or plant part.

[0436] In an aspect, the invention relates to a method for generating or modifying a plant or plant part, comprising
[0437] a) providing a plant or plant part not expressing or having reduced expression, activity, and/or stability of the Dwarf11 gene product; and/or having a mutation in the Dwarf11 gene or regulatory sequence thereof;
[0438] b) reducing or eliminating expression, activity, and/or stability of the Myb80 gene product in said plant or plant part; and/or introducing a homozygous mutation in the Myb80 gene or regulatory sequence thereof.

[0439] In an aspect, the invention relates to a method for generating or modifying a plant or plant part, comprising
[0440] a) providing a plant or plant part not expressing or having reduced expression, activity, and/or stability of the Dwarf11 gene product and/or by having a mutation in the Dwarf11 gene or regulatory sequence thereof;
[0441] b) reducing or eliminating expression, activity, and/or stability of the Myb80 gene product in said plant or plant part and or by introducing a homozygous mutation in the Myb80 gene or regulatory sequence thereof.

[0442] In an aspect, the invention relates to a method for generating or modifying a plant or plant part, comprising
[0443] a) providing a plant or plant part having a mutation in the Dwarf11 gene or regulatory sequence thereof;
[0444] b) introducing a homozygous mutation in the Myb80 gene or regulatory sequence thereof.

[0445] In an aspect, the invention relates to a method for generating or modifying a plant or plant part, comprising
[0446] a) providing a plant or plant part having a mutation in the Dwarf11 gene or regulatory sequence thereof, thereby reducing or eliminating the expression, activity, and/or stability of the Dwarf11 gene product;
[0447] b) introducing a homozygous mutation in the Myb80 gene or regulatory sequence thereof, thereby reducing or eliminating the expression, activity, and/or stability of the Myb80 gene product.

[0448] In an aspect, the invention relates to a method for generating or modifying a plant or plant part, comprising
[0449] a) providing a plant or plant part not expressing or having reduced expression, activity, and/or stability of the Dwarf11 gene product;
[0450] b) introducing a homozygous mutation in the Myb80 gene or regulatory sequence thereof.

[0451] In an aspect, the invention relates to a method for generating or modifying a plant or plant part, comprising
[0452] a) providing a plant or plant part having a mutation in the Dwarf11 gene or regulatory sequence thereof;
[0453] b) reducing or eliminating expression, activity, and/or stability of the Myb80 gene product in said plant or plant part.

[0454] In an aspect, the invention relates to a method for generating or modifying a plant or plant part, comprising
[0455] a) providing a plant or plant part not expressing or having reduced expression, activity, and/or stability of the Dwarf11 gene product; and/or having a mutation in the Dwarf11 gene or regulatory sequence thereof;
[0456] b) reducing or eliminating expression, activity, and/or stability of the Myb80 gene product in said plant or plant part; and/or introducing a heterozygous mutation in the Myb80 gene or regulatory sequence thereof.

[0457] In an aspect, the invention relates to a method for generating or modifying a plant or plant part, comprising
[0458] a) providing a plant or plant part not expressing or having reduced expression, activity, and/or stability of the Dwarf11 gene product and or by having a mutation in the Dwarf11 gene or regulatory sequence thereof;
[0459] b) reducing or eliminating expression, activity, and/or stability of the Myb80 gene product in said plant or plant part and or by introducing a heterozygous mutation in the Myb80 gene or regulatory sequence thereof.

[0460] In an aspect, the invention relates to a method for generating or modifying a plant or plant part, comprising
[0461] a) providing a plant or plant part having a mutation in the Dwarf11 gene or regulatory sequence thereof;
[0462] b) introducing a heterozygous mutation in the Myb80 gene or regulatory sequence thereof.

[0463] In an aspect, the invention relates to a method for generating or modifying a plant or plant part, comprising
[0464] a) providing a plant or plant part having a mutation in the Dwarf11 gene or regulatory sequence thereof, thereby reducing or eliminating the expression, activity, and/or stability of the Dwarf11 gene product;
[0465] b) introducing a heterozygous mutation in the Myb80 gene or regulatory sequence thereof, thereby reducing or eliminating the expression, activity, and/or stability of the Myb80 gene product.

[0466] In an aspect, the invention relates to a method for generating or modifying a plant or plant part, comprising
[0467] a) providing a plant or plant part not expressing or having reduced expression, activity, and/or stability of the Dwarf11 gene product;
[0468] b) introducing a heterozygous mutation in the Myb80 gene or regulatory sequence thereof.

[0469] In an aspect, the invention relates to a method for generating or modifying a plant or plant part, comprising
[0470] a) providing a plant or plant part having a mutation in the Dwarf11 gene or regulatory sequence thereof;
[0471] b) reducing or eliminating expression, activity, and/or stability of the Myb80 gene product in said plant or plant part.

[0472] In an aspect, the invention relates to a method for generating or modifying a plant or plant part, comprising
[0473] a) providing a plant or plant part not expressing or having reduced expression, activity, and/or stability of the Dwarf11 gene product; and/or having a homozygous mutation in the Dwarf11 gene or regulatory sequence thereof;
[0474] b) reducing or eliminating expression, activity, and/or stability of the Myb80 gene product in said plant or plant part; and/or introducing a homozygous mutation in the Myb80 gene or regulatory sequence thereof.

[0475] In an aspect, the invention relates to a method for generating or modifying a plant or plant part, comprising
[0476] a) providing a plant or plant part not expressing or having reduced expression, activity, and/or stability of the Dwarf11 gene product and or by having a homozygous mutation in the Dwarf11 gene or regulatory sequence thereof;
[0477] b) reducing or eliminating expression, activity, and/or stability of the Myb80 gene product in said plant or plant part and or by introducing a homozygous mutation in the Myb80 gene or regulatory sequence thereof.

[0478] In an aspect, the invention relates to a method for generating or modifying a plant or plant part, comprising
[0479] a) providing a plant or plant part having a homozygous mutation in the Dwarf11 gene or regulatory sequence thereof;
[0480] b) introducing a homozygous mutation in the Myb80 gene or regulatory sequence thereof.

[0481] In an aspect, the invention relates to a method for generating or modifying a plant or plant part, comprising
[0482] a) providing a plant or plant part having a homozygous mutation in the Dwarf11 gene or regulatory sequence thereof, thereby reducing or eliminating the expression, activity, and/or stability of the Dwarf11 gene product;
[0483] b) introducing a homozygous mutation in the Myb80 gene or regulatory sequence thereof, thereby reducing or eliminating the expression, activity, and/or stability of the Myb80 gene product.

[0484] In an aspect, the invention relates to a method for generating or modifying a plant or plant part, comprising
[0485] a) providing a plant or plant part not expressing or having reduced expression, activity, and/or stability of the Dwarf11 gene product;
[0486] b) introducing a homozygous mutation in the Myb80 gene or regulatory sequence thereof.

[0487] In an aspect, the invention relates to a method for generating or modifying a plant or plant part, comprising
[0488] a) providing a plant or plant part having a homozygous mutation in the Dwarf11 gene or regulatory sequence thereof;
[0489] b) reducing or eliminating expression, activity, and/or stability of the Myb80 gene product in said plant or plant part.

[0490] In an aspect, the invention relates to a method for generating or modifying a plant or plant part, comprising
[0491] a) providing a plant or plant part not expressing or having reduced expression, activity, and/or stability of the Dwarf11 gene product; and/or having a homozygous mutation in the Dwarf11 gene or regulatory sequence thereof;
[0492] b) reducing or eliminating expression, activity, and/or stability of the Myb80 gene product in said plant or plant part; and/or introducing a heterozygous mutation in the Myb80 gene or regulatory sequence thereof.

[0493] In an aspect, the invention relates to a method for generating or modifying a plant or plant part, comprising
[0494] a) providing a plant or plant part not expressing or having reduced expression, activity, and/or stability of the Dwarf11 gene product and or by having a homozygous mutation in the Dwarf11 gene or regulatory sequence thereof;
[0495] b) reducing or eliminating expression, activity, and/or stability of the Myb80 gene product in said plant or plant part and or by introducing a heterozygous mutation in the Myb80 gene or regulatory sequence thereof.

[0496] In an aspect, the invention relates to a method for generating or modifying a plant or plant part, comprising
[0497] a) providing a plant or plant part having a homozygous mutation in the Dwarf11 gene or regulatory sequence thereof;
[0498] b) introducing a heterozygous mutation in the Myb80 gene or regulatory sequence thereof.

[0499] In an aspect, the invention relates to a method for generating or modifying a plant or plant part, comprising
[0500] a) providing a plant or plant part having a homozygous mutation in the Dwarf11 gene or regulatory sequence thereof, thereby reducing or eliminating the expression, activity, and/or stability of the Dwarf11 gene product;
[0501] b) introducing a heterozygous mutation in the Myb80 gene or regulatory sequence thereof, thereby reducing or eliminating the expression, activity, and/or stability of the Myb80 gene product.

[0502] In an aspect, the invention relates to a method for generating or modifying a plant or plant part, comprising
[0503] a) providing a plant or plant part not expressing or having reduced expression, activity, and/or stability of the Dwarf11 gene product;
[0504] b) introducing a heterozygous mutation in the Myb80 gene or regulatory sequence thereof.

[0505] In an aspect, the invention relates to a method for generating or modifying a plant or plant part, comprising
[0506] a) providing a plant or plant part having a homozygous mutation in the Dwarf11 gene or regulatory sequence thereof;
[0507] b) reducing or eliminating expression, activity, and/or stability of the Myb80 gene product in said plant or plant part.

[0508] In an aspect, the invention relates to a method for generating or modifying a plant or plant part, comprising
[0509] a) providing a plant or plant part not expressing or having reduced expression, activity, and/or stability of the Dwarf11 gene product; and/or having a homozygous mutation in the Dwarf11 gene or regulatory sequence thereof;
[0510] b) reducing or eliminating expression, activity, and/or stability of the Myb80 gene product in said plant or plant part; and/or introducing a mutation in the Myb80 gene or regulatory sequence thereof.

[0511] In an aspect, the invention relates to a method for generating or modifying a plant or plant part, comprising
[0512] a) providing a plant or plant part not expressing or having reduced expression, activity, and/or stability of the Dwarf11 gene product and or by having a homozygous mutation in the Dwarf11 gene or regulatory sequence thereof;
[0513] b) reducing or eliminating expression, activity, and/or stability of the Myb80 gene product in said plant or plant part and or by introducing a mutation in the Myb80 gene or regulatory sequence thereof.

[0514] In an aspect, the invention relates to a method for generating or modifying a plant or plant part, comprising
[0515] a) providing a plant or plant part having a homozygous mutation in the Dwarf11 gene or regulatory sequence thereof;
[0516] b) introducing a mutation in the Myb80 gene or regulatory sequence thereof.

[0517] In an aspect, the invention relates to a method for generating or modifying a plant or plant part, comprising
[0518] a) providing a plant or plant part having a homozygous mutation in the Dwarf11 gene or regulatory sequence thereof, thereby reducing or eliminating the expression, activity, and/or stability of the Dwarf11 gene product;
[0519] b) introducing a mutation in the Myb80 gene or regulatory sequence thereof, thereby reducing or eliminating the expression, activity, and/or stability of the Myb80 gene product.

[0520] In an aspect, the invention relates to a method for generating or modifying a plant or plant part, comprising
[0521] a) providing a plant or plant part not expressing or having reduced expression, activity, and/or stability of the Dwarf11 gene product;
[0522] b) introducing a mutation in the Myb80 gene or regulatory sequence thereof.

[0523] In an aspect, the invention relates to a method for generating or modifying a plant or plant part, comprising
[0524] a) providing a plant or plant part having a homozygous mutation in the Dwarf11 gene or regulatory sequence thereof;
[0525] b) reducing or eliminating expression, activity, and/or stability of the Myb80 gene product in said plant or plant part.

[0526] In an aspect, the invention relates to a method for generating or modifying a plant or plant part, comprising
[0527] a) providing a plant or plant part not expressing or having reduced expression, activity, and/or stability of the Dwarf11 gene product; and/or having a heterozygous mutation in the Dwarf11 gene or regulatory sequence thereof;
[0528] b) reducing or eliminating expression, activity, and/or stability of the Myb80 gene product in said plant or plant part; and/or introducing a homozygous mutation in the Myb80 gene or regulatory sequence thereof.

[0529] In an aspect, the invention relates to a method for generating or modifying a plant or plant part, comprising
[0530] a) providing a plant or plant part not expressing or having reduced expression, activity, and/or stability of the Dwarf11 gene product and or by having a heterozygous mutation in the Dwarf11 gene or regulatory sequence thereof;
[0531] b) reducing or eliminating expression, activity, and/or stability of the Myb80 gene product in said plant or plant part and or by introducing a homozygous mutation in the Myb80 gene or regulatory sequence thereof.

[0532] In an aspect, the invention relates to a method for generating or modifying a plant or plant part, comprising
[0533] a) providing a plant or plant part having a heterozygous mutation in the Dwarf11 gene or regulatory sequence thereof;
[0534] b) introducing a homozygous mutation in the Myb80 gene or regulatory sequence thereof.

[0535] In an aspect, the invention relates to a method for generating or modifying a plant or plant part, comprising
[0536] a) providing a plant or plant part having a heterozygous mutation in the Dwarf11 gene or regulatory sequence thereof, thereby reducing or eliminating the expression, activity, and/or stability of the Dwarf11 gene product;
[0537] b) introducing a homozygous mutation in the Myb80 gene or regulatory sequence thereof, thereby reducing or eliminating the expression, activity, and/or stability of the Myb80 gene product.

[0538] In an aspect, the invention relates to a method for generating or modifying a plant or plant part, comprising
[0539] a) providing a plant or plant part not expressing or having reduced expression, activity, and/or stability of the Dwarf11 gene product;
[0540] b) introducing a homozygous mutation in the Myb80 gene or regulatory sequence thereof.

[0541] In an aspect, the invention relates to a method for generating or modifying a plant or plant part, comprising
[0542] a) providing a plant or plant part having a heterozygous mutation in the Dwarf11 gene or regulatory sequence thereof;
[0543] b) reducing or eliminating expression, activity, and/or stability of the Myb80 gene product in said plant or plant part.

[0544] In an aspect, the invention relates to a method for generating or modifying a plant or plant part, comprising
[0545] a) providing a plant or plant part not expressing or having reduced expression, activity, and/or stability of the Dwarf11 gene product; and/or having a heterozygous mutation in the Dwarf11 gene or regulatory sequence thereof;
[0546] b) reducing or eliminating expression, activity, and/or stability of the Myb80 gene product in said plant or plant part; and/or introducing a heterozygous mutation in the Myb80 gene or regulatory sequence thereof.

[0547] In an aspect, the invention relates to a method for generating or modifying a plant or plant part, comprising
[0548] a) providing a plant or plant part not expressing or having reduced expression, activity, and/or stability of the Dwarf11 gene product and or by having a heterozygous mutation in the Dwarf11 gene or regulatory sequence thereof;
[0549] b) reducing or eliminating expression, activity, and/or stability of the Myb80 gene product in said plant or plant part and or by introducing a heterozygous mutation in the Myb80 gene or regulatory sequence thereof.

[0550] In an aspect, the invention relates to a method for generating or modifying a plant or plant part, comprising
[0551] a) providing a plant or plant part having a heterozygous mutation in the Dwarf11 gene or regulatory sequence thereof;
[0552] b) introducing a heterozygous mutation in the Myb80 gene or regulatory sequence thereof.

[0553] In an aspect, the invention relates to a method for generating or modifying a plant or plant part, comprising
[0554] a) providing a plant or plant part having a heterozygous mutation in the Dwarf11 gene or regulatory sequence thereof, thereby reducing or eliminating the expression, activity, and/or stability of the Dwarf11 gene product;
[0555] b) introducing a heterozygous mutation in the Myb80 gene or regulatory sequence thereof, thereby reducing or eliminating the expression, activity, and/or stability of the Myb80 gene product.

[0556] In an aspect, the invention relates to a method for generating or modifying a plant or plant part, comprising
[0557] a) providing a plant or plant part not expressing or having reduced expression, activity, and/or stability of the Dwarf11 gene product;
[0558] b) introducing a heterozygous mutation in the Myb80 gene or regulatory sequence thereof.

[0559] In an aspect, the invention relates to a method for generating or modifying a plant or plant part, comprising
[0560] a) providing a plant or plant part having a heterozygous mutation in the Dwarf11 gene or regulatory sequence thereof;
[0561] b) reducing or eliminating expression, activity, and/or stability of the Myb80 gene product in said plant or plant part.

[0562] In an aspect, the invention relates to a method for generating or modifying a plant or plant part, comprising
[0563] a) providing a plant or plant part not expressing or having reduced expression, activity, and/or stability of the Dwarf11 gene product; and/or having a heterozygous mutation in the Dwarf11 gene or regulatory sequence thereof;
[0564] b) reducing or eliminating expression, activity, and/or stability of the Myb80 gene product in said plant or plant part; and/or introducing a mutation in the Myb80 gene or regulatory sequence thereof.

[0565] In an aspect, the invention relates to a method for generating or modifying a plant or plant part, comprising
[0566] a) providing a plant or plant part not expressing or having reduced expression, activity, and/or stability of the Dwarf11 gene product and or by having a heterozygous mutation in the Dwarf11 gene or regulatory sequence thereof;
[0567] b) reducing or eliminating expression, activity, and/or stability of the Myb80 gene product in said plant or plant part and or by introducing a mutation in the Myb80 gene or regulatory sequence thereof.

[0568] In an aspect, the invention relates to a method for generating or modifying a plant or plant part, comprising
[0569] a) providing a plant or plant part having a heterozygous mutation in the Dwarf11 gene or regulatory sequence thereof;
[0570] b) introducing a mutation in the Myb80 gene or regulatory sequence thereof.

[0571] In an aspect, the invention relates to a method for generating or modifying a plant or plant part, comprising
[0572] a) providing a plant or plant part having a heterozygous mutation in the Dwarf11 gene or regulatory sequence thereof, thereby reducing or eliminating the expression, activity, and/or stability of the Dwarf11 gene product;
[0573] b) introducing a mutation in the Myb80 gene or regulatory sequence thereof, thereby reducing or eliminating the expression, activity, and/or stability of the Myb80 gene product.

[0574] In an aspect, the invention relates to a method for generating or modifying a plant or plant part, comprising
[0575] a) providing a plant or plant part not expressing or having reduced expression, activity, and/or stability of the Dwarf11 gene product;
[0576] b) introducing a mutation in the Myb80 gene or regulatory sequence thereof.

[0577] In an aspect, the invention relates to a method for generating or modifying a plant or plant part, comprising
[0578] a) providing a plant or plant part having a heterozygous mutation in the Dwarf11 gene or regulatory sequence thereof;
[0579] b) reducing or eliminating expression, activity, and/or stability of the Myb80 gene product in said plant or plant part.

[0580] In an aspect, the invention relates to a method for generating or modifying a plant or plant part, comprising
[0581] a) providing a plant or plant part;
[0582] b) simultaneously or sequentially in either order reducing or eliminating expression, activity, and/or stability of the MYB80 gene product and the DWARF11 gene product in said plant or plant part.

[0583] In an aspect, the invention relates to a method for generating or modifying a plant or plant part, comprising
[0584] a) providing a plant or plant part;
[0585] b) simultaneously or sequentially in either order b1) reducing or eliminating expression, activity, and/or stability of the MYB80 gene product and the DWARF11 gene product in said plant or plant part; and/or b2) mutating the Myb80 gene and the Dwarf11 gene or regulatory sequences thereof; or a combination of b1) and b2).

[0586] In an aspect, the invention relates to a method for generating or modifying a plant or plant part, comprising
[0587] a) providing a plant or plant part;
[0588] b) simultaneously or sequentially in either order mutating the Myb80 gene and the Dwarf11 gene or regulatory sequences thereof.

[0589] In an aspect, the invention relates to a method for generating or modifying a plant or plant part, comprising
[0590] a) providing a plant or plant part;
[0591] b) simultaneously or sequentially in either order reducing or eliminating expression, activity, and/or stability of the MYB80 gene product and the DWARF11 gene product in said plant or plant part and or by mutating the Myb80 gene and the Dwarf11 gene or regulatory sequences thereof.

[0592] In an aspect, the invention relates to a method for generating or modifying a plant or plant part, comprising
[0593] a) providing a plant or plant part;
[0594] b) simultaneously or sequentially in either order mutating the Myb80 gene and the Dwarf11 gene or regulatory sequences thereof, thereby reducing or eliminating the expression, activity, and/or stability of the Myb80 and Dwarf11 gene products.

[0595] In an aspect, the invention relates to a method for generating or modifying a plant or plant part, comprising
[0596] a) providing a plant or plant part;
[0597] b) simultaneously or sequentially in either order b1) reducing or eliminating expression, activity, and/or stability of the MYB80 gene product and the DWARF11 gene product in said plant or plant part; and/or b2) mutating the Myb80 gene homozygously and the Dwarf11 gene or regulatory sequences thereof; or a combination of b1) and b2).

[0598] In an aspect, the invention relates to a method for generating or modifying a plant or plant part, comprising
[0599] a) providing a plant or plant part;
[0600] b) simultaneously or sequentially in either order mutating the Myb80 gene homozygously and the Dwarf11 gene or regulatory sequences thereof.

[0601] In an aspect, the invention relates to a method for generating or modifying a plant or plant part, comprising
[0602] a) providing a plant or plant part;
[0603] b) simultaneously or sequentially in either order reducing or eliminating expression, activity, and/or stability of the MYB80 gene product and the DWARF11 gene product in said plant or plant part and or by mutating the Myb80 gene homozygously and the Dwarf11 gene or regulatory sequences thereof.

[0604] In an aspect, the invention relates to a method for generating or modifying a plant or plant part, comprising
[0605] a) providing a plant or plant part;
[0606] b simultaneously or sequentially in either order mutating the Myb80 gene homozygously and the Dwarf11 gene or regulatory sequences thereof, thereby reducing or eliminating the expression, activity, and/or stability of the Myb80 and Dwarf11 gene products.

[0607] In an aspect, the invention relates to a method for generating or modifying a plant or plant part, comprising
[0608] a) providing a plant or plant part;
[0609] b) simultaneously or sequentially in either order b1) reducing or eliminating expression, activity, and/or stability of the MYB80 gene product and the DWARF11 gene product in said plant or plant part; and/or b2) mutating the Myb80 gene homozygously and the Dwarf11 gene heterozygously or regulatory sequences thereof; or a combination of b1) and b2).

[0610] In an aspect, the invention relates to a method for generating or modifying a plant or plant part, comprising
[0611] a) providing a plant or plant part;
[0612] b) simultaneously or sequentially in either order mutating the Myb80 gene homozygously and the Dwarf11 gene heterozygously or regulatory sequences thereof.

[0613] In an aspect, the invention relates to a method for generating or modifying a plant or plant part, comprising
[0614] a) providing a plant or plant part;
[0615] b) simultaneously or sequentially in either order reducing or eliminating expression, activity, and/or stability of the MYB80 gene product and the DWARF11 gene product in said plant or plant part and or by mutating the Myb80 gene homozygously and the Dwarf11 gene heterozygously or regulatory sequences thereof.

[0616] In an aspect, the invention relates to a method for generating or modifying a plant or plant part, comprising
[0617] a) providing a plant or plant part;
[0618] b) simultaneously or sequentially in either order mutating the Myb80 gene homozygously and the Dwarf11 gene heterozygously or regulatory sequences thereof, thereby reducing or eliminating the expression, activity, and/or stability of the Myb80 and Dwarf11 gene products.

[0619] In an aspect, the invention relates to a method for generating or modifying a plant or plant part, comprising
[0620] a) providing a plant or plant part;
[0621] b) simultaneously or sequentially in either order b1) reducing or eliminating expression, activity, and/or stability of the MYB80 gene product and the DWARF11 gene product in said plant or plant part; and/or b2) mutating the Myb80 gene homozygously and the Dwarf11 gene homozygously or regulatory sequences thereof; or a combination of b1) and b2).

[0622] In an aspect, the invention relates to a method for generating or modifying a plant or plant part, comprising
[0623] a) providing a plant or plant part;
[0624] b) simultaneously or sequentially in either order mutating the Myb80 gene homozygously and the Dwarf11 gene homozygously or regulatory sequences thereof.

[0625] In an aspect, the invention relates to a method for generating or modifying a plant or plant part, comprising
[0626] a) providing a plant or plant part;
[0627] b) simultaneously or sequentially in either order reducing or eliminating expression, activity, and/or stability of the MYB80 gene product and the DWARF11 gene product in said plant or plant part and or by mutating the Myb80 gene homozygously and the Dwarf11 gene homozygously or regulatory sequences thereof.

[0628] In an aspect, the invention relates to a method for generating or modifying a plant or plant part, comprising
[0629] a) providing a plant or plant part;
[0630] b) simultaneously or sequentially in either order mutating the Myb80 gene homozygously and the Dwarf11 gene homozygously or regulatory sequences thereof, thereby reducing or eliminating the expression, activity, and/or stability of the Myb80 and Dwarf11 gene products.

[0631] In an aspect, the invention relates to a method for generating or modifying a plant or plant part, comprising
[0632] a) providing a plant or plant part;
[0633] b) simultaneously or sequentially in either order b1) reducing or eliminating expression, activity, and/or stability of the MYB80 gene product and the DWARF11 gene product in said plant or plant part; and/or b2) mutating the Myb80 gene heterozygously and the Dwarf11 gene or regulatory sequences thereof; or a combination of b1) and b2).

[0634] In an aspect, the invention relates to a method for generating or modifying a plant or plant part, comprising
[0635] a) providing a plant or plant part;
[0636] b) simultaneously or sequentially in either order mutating the Myb80 gene heterozygously and the Dwarf11 gene or regulatory sequences thereof.

[0637] In an aspect, the invention relates to a method for generating or modifying a plant or plant part, comprising
[0638] a) providing a plant or plant part;
[0639] b) simultaneously or sequentially in either order reducing or eliminating expression, activity, and/or stability of the MYB80 gene product and the DWARF11 gene product in said plant or plant part and or by mutating the Myb80 gene heterozygously and the Dwarf11 gene or regulatory sequences thereof.

[0640] In an aspect, the invention relates to a method for generating or modifying a plant or plant part, comprising
[0641] a) providing a plant or plant part;
[0642] b) simultaneously or sequentially in either order mutating the Myb80 gene heterozygously and the Dwarf11 gene or regulatory sequences thereof, thereby reducing or eliminating the expression, activity, and/or stability of the Myb80 and Dwarf11 gene products.

[0643] In an aspect, the invention relates to a method for generating or modifying a plant or plant part, comprising
[0644] a) providing a plant or plant part;
[0645] b) simultaneously or sequentially in either order b1) reducing or eliminating expression, activity, and/or stability of the MYB80 gene product and the DWARF11 gene product in said plant or plant part; and/or b2) mutating the Myb80 gene heterozygously and the Dwarf11 gene homozygously or regulatory sequences thereof; or a combination of b1) and b2).

[0646] In an aspect, the invention relates to a method for generating or modifying a plant or plant part, comprising
[0647] a) providing a plant or plant part;
[0648] b) simultaneously or sequentially in either order mutating the Myb80 gene heterozygously and the Dwarf11 gene homozygously or regulatory sequences thereof.

[0649] In an aspect, the invention relates to a method for generating or modifying a plant or plant part, comprising
[0650] a) providing a plant or plant part;
[0651] b) simultaneously or sequentially in either order reducing or eliminating expression, activity, and/or stability of the MYB80 gene product and the DWARF11 gene product in said plant or plant part and or by mutating the Myb80 gene heterozygously and the Dwarf11 gene homozygously or regulatory sequences thereof.

[0652] In an aspect, the invention relates to a method for generating or modifying a plant or plant part, comprising
[0653] a) providing a plant or plant part;
[0654] b) simultaneously or sequentially in either order mutating the Myb80 gene heterozygously and the Dwarf11 gene homozygously or regulatory sequences thereof, thereby reducing or eliminating the expression, activity, and/or stability of the Myb80 and Dwarf11 gene products.

[0655] In an aspect, the invention relates to a method for generating or modifying a plant or plant part, comprising
[0656] a) providing a plant or plant part;
[0657] b) simultaneously or sequentially in either order b1) reducing or eliminating expression, activity, and/or stability of the MYB80 gene product and the DWARF11 gene product in said plant or plant part; and/or b2) mutating the Myb80 gene heterozygously and the Dwarf11 gene heterozygously or regulatory sequences thereof; or a combination of b1) and b2).

[0658] In an aspect, the invention relates to a method for generating or modifying a plant or plant part, comprising
[0659] a) providing a plant or plant part;
[0660] b) simultaneously or sequentially in either order mutating the Myb80 gene heterozygously and the Dwarf11 gene heterozygously or regulatory sequences thereof.

[0661] In an aspect, the invention relates to a method for generating or modifying a plant or plant part, comprising
[0662] a) providing a plant or plant part;
[0663] b) simultaneously or sequentially in either order reducing or eliminating expression, activity, and/or stability of the MYB80 gene product and the DWARF11 gene product in said plant or plant part and or by mutating the Myb80 gene heterozygously and the Dwarf11 gene heterozygously or regulatory sequences thereof.

[0664] In an aspect, the invention relates to a method for generating or modifying a plant or plant part, comprising
[0665] a) providing a plant or plant part;
[0666] b) simultaneously or sequentially in either order mutating the Myb80 gene heterozygously and the Dwarf11 gene heterozygously or regulatory sequences thereof, thereby reducing or eliminating the expression, activity, and/or stability of the Myb80 and Dwarf11 gene products.

[0667] In an aspect, the invention relates to a method for generating or modifying a plant or plant part, comprising
[0668] a) providing a plant or plant part;
[0669] b) simultaneously or sequentially in either order b1) reducing or eliminating expression, activity, and/or stability of the MYB80 gene product and the DWARF11 gene product in said plant or plant part; and/or b2) mutating the Myb80 gene and the Dwarf11 gene heterozygously or regulatory sequences thereof; or a combination of b1) and b2).

[0670] In an aspect, the invention relates to a method for generating or modifying a plant or plant part, comprising
[0671] a) providing a plant or plant part;
[0672] b) simultaneously or sequentially in either order mutating the Myb80 gene and the Dwarf11 gene heterozygously or regulatory sequences thereof.

[0673] In an aspect, the invention relates to a method for generating or modifying a plant or plant part, comprising
[0674] a) providing a plant or plant part;
[0675] b) simultaneously or sequentially in either order reducing or eliminating expression, activity, and/or stability of the MYB80 gene product and the DWARF11 gene product in said plant or plant part and or by mutating the Myb80 gene and the Dwarf11 gene heterozygously or regulatory sequences thereof.

[0676] In an aspect, the invention relates to a method for generating or modifying a plant or plant part, comprising
[0677] a) providing a plant or plant part;
[0678] b) simultaneously or sequentially in either order mutating the Myb80 gene and the Dwarf11 gene heterozygously or regulatory sequences thereof, thereby reducing or eliminating the expression, activity, and/or stability of the Myb80 and Dwarf11 gene products.

[0679] In an aspect, the invention relates to a method for generating or modifying a plant or plant part, comprising
[0680] a) providing a plant or plant part;
[0681] b) simultaneously or sequentially in either order b1) reducing or eliminating expression, activity, and/or stability of the MYB80 gene product and the DWARF11 gene product in said plant or plant part; and/or b2) mutating the Myb80 gene and the Dwarf11 gene homozygously or regulatory sequences thereof; or a combination of b1) and b2).

[0682] In an aspect, the invention relates to a method for generating or modifying a plant or plant part, comprising
[0683] a) providing a plant or plant part;
[0684] b) simultaneously or sequentially in either order mutating the Myb80 gene and the Dwarf11 gene homozygously or regulatory sequences thereof.

[0685] In an aspect, the invention relates to a method for generating or modifying a plant or plant part, comprising
[0686] a) providing a plant or plant part;
[0687] b) simultaneously or sequentially in either order reducing or eliminating expression, activity, and/or stability of the MYB80 gene product and the DWARF11 gene product in said plant or plant part and or by mutating the Myb80 gene and the Dwarf11 gene homozygously or regulatory sequences thereof.

[0688] In an aspect, the invention relates to a method for generating or modifying a plant or plant part, comprising
[0689] a) providing a plant or plant part;
[0690] b) simultaneously or sequentially in either order mutating the Myb80 gene and the Dwarf11 gene homozygously or regulatory sequences thereof, thereby reducing or eliminating the expression, activity, and/or stability of the Myb80 and Dwarf11 gene products.

[0691] In an aspect, the invention relates to a method for generating a plant or plant part, comprising
[0692] a) crossing a first plant and a second plant; wherein said first plant and/or said second plant have a heterozygous or homozygous mutation in (both) the MYB80 gene and the DWARF11 gene on the same chromosome;
[0693] b) harvesting seeds;
[0694] c) optionally selecting seeds having a homozygous or heterozygous mutation in (both) the Myb80 gene and the Dwarf11 gene;
[0695] d) optionally sowing said seeds.

[0696] In an aspect, the invention relates to a method for generating a plant or plant part, comprising
[0697] a) crossing a first plant and a second plant; wherein said first plant and said second plant have a heterozygous mutation in (both) the MYB80 gene and the DWARF11 gene on the same chromosome;
[0698] b) harvesting seeds;
[0699] c) optionally selecting seeds having a homozygous or heterozygous mutation in (both) the Myb80 gene and the Dwarf11 gene;
[0700] d) optionally sowing said seeds.

[0701] In an aspect, the invention relates to a method for generating a plant or plant part, comprising
[0702] a) crossing a first plant and a second plant; wherein only one of said first plant or said second plant has a homozygous mutation in (both) the MYB80 gene and the DWARF11 gene on the same chromosome;
[0703] b) harvesting seeds;
[0704] c) optionally selecting seeds having a homozygous or heterozygous mutation in (both) the Myb80 gene and the Dwarf11 gene;
[0705] d) optionally sowing said seeds.

[0706] In an aspect, the invention relates to a method for generating a plant or plant part, comprising
[0707] a) crossing a first plant and a second plant; wherein said first plant has a homozygous mutation in (both) the MYB80 gene and the DWARF11 gene on the same chromosome, and wherein said second plant has a heterozygous mutation in (both) the MYB80 gene and the DWARF11 gene on the same chromosome;
[0708] b) harvesting seeds;
[0709] c) optionally selecting seeds having a homozygous or heterozygous mutation in (both) the Myb80 gene and the Dwarf11 gene;
[0710] d) optionally sowing said seeds.

[0711] In an aspect, the invention relates to a method for generating a plant or plant part, comprising
[0712] a) crossing a first plant and a second plant; wherein said first plant and/or said second plant have a heterozygous or homozygous mutation in (both) the MYB80 gene and the DWARF11 gene on the same chromosome, thereby lacking or having reduced expression, activity, and/or stability of the Myb80 and Dwarf11 gene products;
[0713] b) harvesting seeds;
[0714] c) optionally selecting seeds having a homozygous or heterozygous mutation in (both) the Myb80 gene and the Dwarf11 gene and/or lacking or having reduced expression, activity, and/or stability of the Myb80 and Dwarf11 gene products;
[0715] d) optionally sowing said seeds.

[0716] In an aspect, the invention relates to a method for generating a plant or plant part, comprising
[0717] a) crossing a first plant and a second plant; wherein said first plant and said second plant have a heterozygous mutation in (both) the MYB80 gene and the DWARF11 gene on the same chromosome, thereby lacking or having reduced expression, activity, and/or stability of the Myb80 and Dwarf11 gene products;
[0718] b) harvesting seeds;
[0719] c) optionally selecting seeds having a homozygous or heterozygous mutation in (both) the Myb80 gene and the Dwarf11 gene and/or lacking or having reduced expression, activity, and/or stability of the Myb80 and Dwarf11 gene products;
[0720] d) optionally sowing said seeds.

[0721] In an aspect, the invention relates to a method for generating a plant or plant part, comprising
[0722] a) crossing a first plant and a second plant; wherein only one of said first plant or said second plant has a homozygous mutation in (both) the MYB80 gene and the DWARF11 gene on the same chromosome, thereby lacking or having reduced expression, activity, and/or stability of the Myb80 and Dwarf11 gene products;
[0723] b) harvesting seeds;
[0724] c) optionally selecting seeds having a homozygous or heterozygous mutation in (both) the Myb80 gene and the Dwarf11 gene and/or lacking or having reduced expression, activity, and/or stability of the Myb80 and Dwarf11 gene products;
[0725] d) optionally sowing said seeds.

[0726] In an aspect, the invention relates to a method for generating a plant or plant part, comprising
[0727] a) crossing a first plant and a second plant; wherein said first plant has a homozygous mutation in (both) the MYB80 gene and the DWARF11 gene on the same chromosome, and wherein said second plant has a heterozygous mutation in (both) the MYB80 gene and the DWARF11 gene on the same chromosome, thereby lacking or having reduced expression, activity, and/or stability of the Myb80 and Dwarf11 gene products;
[0728] b) harvesting seeds;
[0729] c) optionally selecting seeds having a homozygous or heterozygous mutation in (both) the Myb80 gene and the Dwarf11 gene and/or lacking or having reduced expression, activity, and/or stability of the Myb80 and Dwarf11 gene products;
[0730] d) optionally sowing said seeds.

[0731] In an aspect, the invention relates to a method for generating a plant or plant part, comprising
[0732] a) crossing a first plant and a second plant; wherein said first plant and/or said second plant lack or have reduced expression, activity, and/or stability of (both) the MYB80 gene product and the DWARF11 gene product;
[0733] b) harvesting seeds;
[0734] c) optionally selecting seeds lacking or having reduced expression, activity, and/or stability of (both) the MYB80 gene product and the DWARF11 gene product;
[0735] d) optionally sowing said seeds.

[0736] In an aspect, the invention relates to a method for generating a plant or plant part, comprising
[0737] a) crossing a first plant and a second plant; wherein said first plant and/or said second plant lack or have reduced expression, activity, and/or stability of (both) the MYB80 gene product and the DWARF11 gene product by having a homozygous or heterozygous mutation in (both) the Myb80 gene and the Dwarf11 gene.;
[0738] b) harvesting seeds;
[0739] c) optionally selecting seeds lacking or having reduced expression, activity, and/or stability of (both) the MYB80 gene product and the DWARF11 gene product and/or having a homozygous or heterozygous mutation in (both) the Myb80 gene and the Dwarf11 gene;
[0740] d) optionally sowing said seeds.

[0741] In an aspect, the invention relates to a method for producing, obtaining, or selecting a plant or plant part, preferably a seed, comprising
[0742] a) providing a (bulk or unselected) mixture of plants or plant parts resulting from a cross between a first plant and a second plant; wherein said first plant and/or said second plant have a heterozygous or homozygous mutation in (both) the MYB80 gene and the DWARF11 gene on the same chromosome;
[0743] b harvesting seeds;
[0744] c) selecting seeds having a homozygous mutation in (both) the Myb80 gene and the Dwarf11 gene;
[0745] d) optionally sowing said seeds.

[0746] In an aspect, the invention relates to a method for producing, obtaining, or selecting a plant or plant part, preferably a seed, comprising
[0747] a) providing a (bulk or unselected) mixture of plants or plant parts resulting from a cross between a first plant and a second plant; wherein said first plant and said second plant have a heterozygous mutation in (both) the MYB80 gene and the DWARF11 gene on the same chromosome;
[0748] b) harvesting seeds;
[0749] c) selecting seeds having a homozygous mutation in (both) the Myb80 gene and the Dwarf11 gene;
[0750] d) optionally sowing said seeds.

[0751] In an aspect, the invention relates to a method for producing, obtaining, or selecting a plant or plant part, preferably a seed, comprising
[0752] a) providing a (bulk or unselected) mixture of plants or plant parts resulting from a cross between a first plant and a second plant; wherein only one of said first plant or said second plant has a homozygous mutation in (both) the MYB80 gene and the DWARF11 gene on the same chromosome;
[0753] b) harvesting seeds;
[0754] c) selecting seeds having a homozygous mutation in (both) the Myb80 gene and the Dwarf11 gene;
[0755] d) optionally sowing said seeds.

[0756] In an aspect, the invention relates to a method for producing, obtaining, or selecting a plant or plant part, preferably a seed, comprising
[0757] a) providing a (bulk or unselected) mixture of plants or plant parts resulting from a cross between a first plant and a second plant; wherein said first plant has a homozygous mutation in (both) the MYB80 gene and the DWARF11 gene on the same chromosome, and wherein said second plant has a heterozygous mutation in (both) the MYB80 gene and the DWARF11 gene on the same chromosome;
[0758] b) harvesting seeds;
[0759] c) selecting seeds having a homozygous mutation in (both) the Myb80 gene and the Dwarf11 gene;
[0760] d) optionally sowing said seeds.

[0761] In an aspect, the invention relates to a method for producing, obtaining, or selecting a plant or plant part, preferably a seed, comprising
[0762] a) providing a (bulk or unselected) mixture of plants or plant parts resulting from a cross between a first plant and a second plant; wherein said first plant and/or said second plant have a heterozygous or homozygous mutation in (both) the MYB80 gene and the DWARF11 gene on the same chromosome, thereby lacking or having reduced expression, activity, and/or stability of the Myb80 and Dwarf11 gene products;
[0763] b) harvesting seeds;
[0764] c) selecting seeds having a homozygous mutation in (both) the Myb80 gene and the Dwarf11 gene and/or lacking or having reduced expression, activity, and/or stability of the Myb80 and Dwarf11 gene products;
[0765] d) optionally sowing said seeds.

[0766] In an aspect, the invention relates to a method for producing, obtaining, or selecting a plant or plant part, preferably a seed, comprising
[0767] a) providing a (bulk or unselected) mixture of plants or plant parts resulting from a cross between a first plant and a second plant; wherein said first plant and said second plant have a heterozygous mutation in (both) the MYB80 gene and the DWARF11 gene on the same chromosome, thereby lacking or having reduced expression, activity, and/or stability of the Myb80 and Dwarf11 gene products;
[0768] b) harvesting seeds;
[0769] c) selecting seeds having a homozygous mutation in (both) the Myb80 gene and the Dwarf11 gene and/or lacking or having reduced expression, activity, and/or stability of the Myb80 and Dwarf11 gene products;
[0770] d) optionally sowing said seeds.

[0771] In an aspect, the invention relates to a method for producing, obtaining, or selecting a plant or plant part, preferably a seed, comprising
[0772] a) providing a (bulk or unselected) mixture of plants or plant parts resulting from a cross between a first plant and a second plant; wherein only one of said first plant or said second plant has a homozygous mutation in (both) the MYB80 gene and the DWARF11 gene on the same chromosome, thereby lacking or having reduced expression, activity, and/or stability of the Myb80 and Dwarf11 gene products;
[0773] b harvesting seeds;
[0774] c) selecting seeds having a homozygous mutation in (both) the Myb80 gene and the Dwarf11 gene and/or lacking or having reduced expression, activity, and/or stability of the Myb80 and Dwarf11 gene products;
[0775] d) optionally sowing said seeds.

[0776] In an aspect, the invention relates to a method for producing, obtaining, or selecting a plant or plant part, preferably a seed, comprising
[0777] a) providing a (bulk or unselected) mixture of plants or plant parts resulting from a cross between a first plant and a second plant; wherein said first plant has a homozygous mutation in (both) the MYB80 gene and the DWARF11 gene on the same chromosome, and wherein said second plant has a heterozygous mutation in (both) the MYB80 gene and the DWARF11 gene on the same chromosome, thereby lacking or having reduced expression, activity, and/or stability of the Myb80 and Dwarf11 gene products;
[0778] b) harvesting seeds;
[0779] c) selecting seeds having a homozygous mutation in (both) the Myb80 gene and the Dwarf11 gene and/or lacking or having reduced expression, activity, and/or stability of the Myb80 and Dwarf11 gene products;
[0780] d) optionally sowing said seeds.

[0781] In an aspect, the invention relates to a method for producing, obtaining, or selecting a plant or plant part, preferably a seed, comprising
[0782] a) providing a (bulk or unselected) mixture of plants or plant parts resulting from a cross between a first plant and a second plant; wherein said first plant and/or said second plant lack or have reduced expression, activity, and/or stability of (both) the MYB80 gene product and the DWARF11 gene product;
[0783] b) harvesting seeds;
[0784] c) selecting seeds lacking or having reduced expression, activity, and/or stability of (both) the MYB80 gene product and the DWARF11 gene product;
[0785] d) optionally sowing said seeds.

[0786] In an aspect, the invention relates to a method for producing, obtaining, or selecting a plant or plant part, preferably a seed, comprising
[0787] a) providing a (bulk or unselected) mixture of plants or plant parts resulting from a cross between a first plant and a second plant; wherein said first plant and/or said second plant lack or have reduced expression, activity, and/or stability of (both) the MYB80 gene product and the DWARF11 gene product by having a homozygous or heterozygous mutation in (both) the Myb80 gene and the Dwarf11 gene.;
[0788] b) harvesting seeds;
[0789] c) selecting seeds lacking or having reduced expression, activity, and/or stability of (both) the MYB80 gene product and the DWARF11 gene product and/or having a homozygous mutation in (both) the Myb80 gene and the Dwarf11 gene;
[0790] d) optionally sowing said seeds.

[0791] In an aspect, the invention relates to a method for identifying and/or selecting a plant or plant part, comprising screening for the presence of a homozygous mutation in the DWARF11 gene in (the genome of) a plant or plant part resulting from a cross between a first plant and a second plant; wherein said first plant and/or said second plant have a heterozygous mutation in the MYB80 gene and the DWARF11 gene on the same chromosome; and optionally selecting a plant or plant part comprising a homozygous mutation in the DWARF11 gene.

[0792] In an aspect, the invention relates to a method for identifying and/or selecting a plant or plant part, comprising screening for the presence of a homozygous mutation in the DWARF11 gene in (the genome of) a plant or plant part resulting from a cross between a first plant and a second plant; wherein said first plant and said second plant have a heterozygous mutation in the MYB80 gene and the DWARF11 gene on the same chromosome; and optionally selecting a plant or plant part comprising a homozygous mutation in the DWARF11 gene.

[0793] In an aspect, the invention relates to a method for identifying and/or selecting a plant or plant part, comprising screening for the presence of a homozygous mutation in the DWARF11 gene in (the genome of) a plant or plant part resulting from a cross between a first plant and a second plant; wherein said first plant has a homozygous mutation in the MYB80 gene and the DWARF11 gene on the same chromosome and wherein said second plant has a heterozygous mutation in the MYB80 gene and the DWARF11 gene on the same chromosome; and optionally selecting a plant or plant part comprising a homozygous mutation in the DWARF11 gene.

[0794] In an aspect, the invention relates to a method for identifying and/or selecting a plant or plant part, comprising screening for the presence of a (homozygous or heterozygous) mutation in the DWARF11 gene in (the genome of) a plant or plant part; and optionally selecting a plant or plant part comprising a (homozygous or heterozygous) mutation in the DWARF11 gene.

[0795] In an aspect, the invention relates to a method for identifying and/or selecting a plant or plant part, comprising screening for the presence of a (homozygous or heterozygous) mutation in the Myb80 gene in (the genome of) a plant or plant part; and optionally selecting a plant or plant part comprising a (homozygous or heterozygous) mutation in the Myb80 gene.

[0796] In an aspect, the invention relates to a method for identifying and/or selecting a plant or plant part, comprising screening for the presence of a (homozygous or heterozygous) mutation in the DWARF11 gene in (the genome of) a plant or plant part having a (homozygous or heterozygous) mutation in the Myb80 gene; and optionally selecting a plant or plant part comprising a (homozygous or heterozygous) mutation in the DWARF11 gene.

[0797] In an aspect, the invention relates to a method for identifying and/or selecting a plant or plant part, comprising screening for the presence of a (homozygous or heterozygous) mutation in the Myb80 gene in (the genome of) a plant or plant part having a (homozygous or heterozygous) mutation in the Dwarf11 gene; and optionally selecting a plant or plant part comprising a (homozygous or heterozygous) mutation in the Myb80 gene.

[0798] In an aspect, the invention relates to a method for identifying and/or selecting a plant or plant part, comprising screening for the presence of a (homozygous or heterozygous) mutation in the DWARF11 gene in (the genome of) a plant or plant part resulting from a cross between a first plant and a second plant; wherein said first plant and/or said second plant have a heterozygous mutation in the MYB80 gene and the DWARF11 gene on the same chromosome; and optionally selecting a plant or plant part comprising a (homozygous or heterozygous) mutation in the DWARF11 gene.

[0799] In an aspect, the invention relates to a method for identifying and/or selecting a plant or plant part, comprising screening for the presence of a (homozygous or heterozygous) mutation in the Myb80 gene in (the genome of) a plant or plant part resulting from a cross between a first plant and a second plant; wherein said first plant and/or said second plant have a heterozygous mutation in the MYB80 gene and the DWARF11 gene on the same chromosome; and optionally selecting a plant or plant part comprising a (homozygous or heterozygous) mutation in the Myb80 gene.

[0800] In an aspect, the invention relates to a method for identifying and/or selecting a plant or plant part, comprising screening for the presence of a (homozygous or heterozygous) mutation in the DWARF11 gene in (the genome of) a plant or plant part having a (homozygous or heterozygous) mutation in the Myb80 gene and resulting from a cross between a first plant and a second plant; wherein said first plant and/or said second plant have a heterozygous mutation in the MYB80 gene and the DWARF11 gene on the same chromosome; and optionally selecting a plant or plant part comprising a (homozygous or heterozygous) mutation in the DWARF11 gene.

[0801] In an aspect, the invention relates to a method for identifying and/or selecting a plant or plant part, comprising screening for the presence of a (homozygous or heterozygous) mutation in the Myb80 gene in (the genome of) a plant or plant part having a (homozygous or heterozygous) mutation in the Dwarf11 gene and resulting from a cross between a first plant and a second plant; wherein said first plant and/or said second plant have a heterozygous mutation in the MYB80 gene and the DWARF11 gene on the same chromosome; and optionally selecting a plant or plant part comprising a (homozygous or heterozygous) mutation in the Myb80 gene.

[0802] In an aspect, the invention relates to a method for identifying and/or selecting a plant or plant part, comprising screening for the presence of a (homozygous or heterozygous) mutation in the DWARF11 gene in (the genome of) a plant or plant part resulting from a cross between a first plant and a second plant; wherein said first plant has a homozygous mutation in the MYB80 gene and the DWARF11 gene on the same chromosome and said second plant has a heterozygous mutation in the MYB80 gene and the DWARF11 gene on the same chromosome; and optionally selecting a plant or plant part comprising a (homozygous or heterozygous) mutation in the DWARF11 gene.

[0803] In an aspect, the invention relates to a method for identifying and/or selecting a plant or plant part, comprising screening for the presence of a (homozygous or heterozygous) mutation in the Myb80 gene in (the genome of) a plant or plant part resulting from a cross between a first plant and a second plant; wherein said first plant has a homozygous mutation in the MYB80 gene and the DWARF11 gene on the same chromosome and said second plant has a heterozygous mutation in the MYB80 gene and the DWARF11 gene on the same chromosome; and optionally selecting a plant or plant part comprising a (homozygous or heterozygous) mutation in the Myb80 gene.

[0804] In an aspect, the invention relates to a method for identifying and/or selecting a plant or plant part, comprising screening for the presence of a (homozygous or heterozygous) mutation in the DWARF11 gene in (the genome of) a plant or plant part having a mutation in the Myb80 gene and resulting from a cross between a first plant and a second plant; wherein said first plant has a homozygous mutation in the MYB80 gene and the DWARF11 gene on the same chromosome and said second plant has a heterozygous mutation in the MYB80 gene and the DWARF11 gene on the same chromosome; and optionally selecting a plant or plant part comprising a (homozygous or heterozygous) mutation in the DWARF11 gene.

[0805] In an aspect, the invention relates to a method for identifying and/or selecting a plant or plant part, comprising screening for the presence of a (homozygous or heterozygous) mutation in the Myb80 gene in (the genome of) a plant or plant part having a mutation in the Dwarf11 gene and resulting from a cross between a first plant and a second plant; wherein said first plant has a homozygous mutation in the MYB80 gene and the DWARF11 gene on the same chromosome and said second plant has a heterozygous mutation in the MYB80 gene and the DWARF11 gene on the same chromosome; and optionally selecting a plant or plant part comprising a (homozygous or heterozygous) mutation in the Myb80 gene.

[0806] In certain embodiments, in particular in embodiments relating to the production of plants or seeds resulting in plants having genetic male sterility, plants or plant parts, such as seeds, are selected which have a homozygous Dwarf11 mutation. Such seeds may be selected based on molecular markers, but may advantageously also be selected phenotypically, for instance based on seed size, as described herein elsewhere. Accordingly, in certain embodiments, the methods according to the invention as described herein are methods for producing male sterile plants or plant parts, such as seeds, preferably methods for producing genetic male sterile plants or plant parts, such as seeds.

[0807] Such plants or plant parts, such as seeds may then be used in hybrid crosses or hybrid breeding, in order to generate hybrid seeds, as such plants due to their male sterility cannot be self-pollinated but can only be cross-pollinated by a pollen donor, which results in hybrid seeds. Hybrid breeding typically results in uniform (hybrid) seed lots. Accordingly, no specific seed selection is required, and the entire harvested lot is useable. Accordingly, in certain embodiments, the methods according to the invention as described herein are methods for producing hybrid plants or plant parts, such as hybrid seeds.

[0808] In an aspect, the invention relates to a method for producing (hybrid) plants or plant parts, comprising sowing seeds resulting from or harvested from a cross between a first plant and a second plant, wherein (only) said first or second plant comprises a homozygous mutation in the Myb80 gene and the Dwarf11 gene on the same chromosome.

[0809] In an aspect, the invention relates to a method for producing (hybrid) plants or plant parts, comprising crossing a first plant and a second plant, wherein (only) said first or second plant comprises a homozygous mutation in the Myb80 gene and the Dwarf11 gene on the same chromosome, and harvesting seeds; optionally further comprising sowing said harvested seeds.

[0810] In an aspect, the invention relates to a method for producing (hybrid) plants or plant parts, comprising sowing seeds resulting from or harvested from a cross between a first plant and a second plant, wherein (only) said first or second plant comprises a homozygous mutation in the Myb80 gene and the Dwarf11 gene on the same chromosome, thereby lacking or having reduced expression, activity, and/or stability of the Myb80 and Dwarf11 gene products.

[0811] In an aspect, the invention relates to a method for producing (hybrid) plants or plant parts, comprising crossing a first plant and a second plant, wherein (only) said first or second plant comprises a homozygous mutation in the Myb80 gene and the Dwarf11 gene on the same chromosome, and harvesting seeds; optionally further comprising sowing said harvested seeds, thereby lacking or having reduced expression, activity, and/or stability of the Myb80 and Dwarf11 gene products.

[0812] In an aspect, the invention relates to a method for producing (hybrid) plants or plant parts, comprising sowing seeds resulting from or harvested from a cross between a first plant and a second plant, wherein (only) said first or second plant lacks or has reduced expression, activity, and/or stability of the Myb80 and Dwarf11 gene products.

[0813] In an aspect, the invention relates to a method for producing (hybrid) plants or plant parts, comprising crossing a first plant and a second plant, wherein (only) said first or second plant lacks or has reduced expression, activity, and/or stability of the Myb80 and Dwarf11 gene products, and harvesting seeds; optionally further comprising sowing said harvested seeds.

[0814] In an aspect, the invention relates to a method for producing (hybrid) plants or plant parts, comprising sowing seeds resulting from or harvested from a cross between a first plant and a second plant, wherein (only) said first or second plant lacks or has reduced expression, activity, and/or stability of the Myb80 and Dwarf11 gene products and or by having a homozygous mutation in the Myb80 gene and the Dwarf11 gene on the same chromosome.

[0815] In an aspect, the invention relates to a method for producing (hybrid) plants or plant parts, comprising crossing a first plant and a second plant, wherein (only) said first or second plant lacks or has reduced expression, activity, and/or stability of the Myb80 and Dwarf11 gene products and or by having a homozygous mutation in the Myb80 gene and the Dwarf11 gene on the same chromosome, and harvesting seeds; optionally further comprising sowing said harvested seeds.

[0816] In an aspect, the invention relates to a method for producing (hybrid) plants or plant parts, comprising crossing a first plant and a second plant, wherein (only) said first or second plant is a plant according to the invention as described herein, or is a plant generated, modified, identified, or selected according to the methods of the invention as described herein.

[0817] In an aspect, the invention relates to a method for producing (genetic male sterile) plants or plant parts, comprising crossing a first plant and a second plant, wherein (only) said first or second plant is a plant according to the invention as described herein, or is a plant generated, modified, identified, or selected according to the methods of the invention as described herein.

[0818] In an aspect, the invention relates to a method for producing (genetic male sterile dwarf) plants or plant parts, comprising crossing a first plant and a second plant, wherein (only) said first or second plant is a plant according to the invention as described herein, or is a plant generated, modified, identified, or selected according to the methods of the invention as described herein.

[0819] In an aspect, the invention relates to a (hybrid) plant or plant part generated, modified, identified, or selected according to the methods for generating, modifying, identifying, or selecting according to the invention as described herein, or (first generation) offspring thereof.

[0820] In an aspect, the invention relates to a (genetic male sterile) plant or plant part generated, modified, identified, or selected according to the methods for generating, modifying, identifying, or selecting according to the invention as described herein, or (first generation) offspring thereof.

[0821] In an aspect, the invention relates to a (genetic male sterile dwarf) plant or plant part generated, modified, identified, or selected according to the methods for generating, modifying, identifying, or selecting according to the invention as described herein, or (first generation) offspring thereof.

[0822] In an aspect, the invention relates to a plants or plant part, comprising a homozygous mutation in the Myb80 gene and the Dwarf11 gene on the same chromosome, or (first generation) offspring thereof.

[0823] In an aspect, the invention relates to a plants or plant part, comprising a heterozygous mutation in the Myb80 gene and the Dwarf11 gene on the same chromosome, or (first generation) offspring thereof.

[0824] In an aspect, the invention relates to a plants or plant part, lacking or having reduced expression, activity, and/or stability of a Myb80 gene and a Dwarf11 gene, or (first generation) offspring thereof.

[0825] In an aspect, the invention relates to a plants or plant part, comprising a homozygous mutation in the Myb80 gene and the Dwarf11 gene on the same chromosome and or thereby lacking or having reduced expression, activity, and/or stability of a Myb80 gene and a Dwarf11 gene, or (first generation) offspring thereof.

[0826] In an aspect, the invention relates to a plants or plant part, comprising a heterozygous mutation in the Myb80 gene and the Dwarf11 gene on the same chromosome and or thereby lacking or having reduced expression, activity, and/or stability of a Myb80 gene and a Dwarf11 gene, or (first generation) offspring thereof.

[0827] In an aspect, the invention relates to a plants or plant part, lacking or having reduced expression, activity, and/or stability of a Myb80 gene and a Dwarf11 gene and or by having a homozygous mutation in the Myb80 gene and the Dwarf11 gene on the same chromosome, or (first generation) offspring thereof.

[0828] In an aspect, the invention relates to a plants or plant part, lacking or having reduced expression, activity, and/or stability of a Myb80 gene and a Dwarf11 gene and or by having a heterozygous mutation in the Myb80 gene and the Dwarf11 gene on the same chromosome, or (first generation) offspring thereof.

[0829] In certain embodiments, the methods according to the invention as described herein are methods for generating, producing, obtaining, identifying, or selecting plants or plant parts which are male or female sterile, preferably male sterile. In certain embodiments, the methods according to the invention as described herein are methods for generating, producing, obtaining, identifying, or selecting plants or plant parts which are genetic male or genetic female sterile, preferably genetic male sterile.

[0830] In certain embodiments, the methods according to the invention as described herein are methods for generating, producing, obtaining, identifying, or selecting plants or plant parts carrying a (homozygous or heterozygous) male or female sterility gene (allele), preferably a (homozygous or heterozygous) male sterility gene (allele). In certain embodiments, the methods according to the invention as described herein are methods for generating, producing, obtaining, identifying, or selecting plants or plant parts carrying a (homozygous or heterozygous) genetic male or genetic female sterility gene (allele), preferably a (homozygous or heterozygous) genetic male sterility gene (allele).

[0831] In certain embodiments, the methods according to the invention as described herein are methods for generating, producing, obtaining, identifying, or selecting plants or plant parts which have a (homozygous or heterozygous) Myb80 (knockout) mutation, such as a (homozygous or heterozygous) Myb80 (knockout) mutation causing or capable of causing (e.g. when homozygous) genetic male sterility.

[0832] In certain embodiments, the methods according to the invention as described herein are methods for generating, producing, obtaining, identifying, or selecting plants or plant parts in which the Myb80 gene is (homozygously or heterozygously) knocked out or deleted.

[0833] In certain embodiments, the methods according to the invention as described herein are methods for generating, producing, obtaining, identifying, or selecting plants or plant parts exhibiting dwarfism, preferably seed dwarfism.

[0834] In certain embodiments, the methods according to the invention as described herein are methods for generating, producing, obtaining, identifying, or selecting plants or plant parts carrying a (homozygous or heterozygous) dwarfism gene (allele), preferably a (homozygous or heterozygous) seed dwarfism gene (allele).

[0835] In certain embodiments, the methods according to the invention as described herein are methods for generating, producing, obtaining, identifying, or selecting plants or plant parts which have a (homozygous or heterozygous) Dwarf11 (knockout) mutation, such as a (homozygous or heterozygous) Dwarf11 (knockout) mutation causing or capable of causing (e.g. when homozygous) dwarfism, such as seed dwarfism.

[0836] In certain embodiments, the methods according to the invention as described herein are methods for generating, producing, obtaining, identifying, or selecting plants or plant parts in which the Dwarf11 gene is (homozygously or heterozygously) knocked out or deleted.

[0837] In certain embodiments, the methods according to the invention as described herein are methods for generating, producing, obtaining, identifying, or selecting plants or plant parts which are male or female sterile, preferably male sterile, and exhibiting dwarfism, preferably seed dwarfism. In certain embodiments, the methods according to the invention as described herein are methods for generating, producing, obtaining, identifying, or selecting plants or plant parts which are genetic male or genetic female sterile, preferably genetic male sterile, and exhibiting dwarfism, preferably seed dwarfism.

[0838] In certain embodiments, the methods according to the invention as described herein are methods for generating, producing, obtaining, identifying, or selecting plants or plant parts carrying a (homozygous or heterozygous) male or female sterility gene (allele), preferably a (homozygous or heterozygous) male sterility gene (allele), and carrying a (homozygous or heterozygous) dwarfism gene (allele), preferably a (homozygous or heterozygous) seed dwarfism gene (allele). In certain embodiments, the methods according to the invention as described herein are methods for generating, producing, obtaining, identifying, or selecting plants or plant parts carrying a (homozygous or heterozygous) genetic male or genetic female sterility gene (allele), preferably a (homozygous or heterozygous) genetic male sterility gene (allele), and carrying a (homozygous or heterozygous) dwarfism gene (allele), preferably a (homozygous or heterozygous) seed dwarfism gene (allele).

[0839] In certain embodiments, the methods according to the invention as described herein are methods for generating, producing, obtaining, identifying, or selecting plants or plant parts which have a (homozygous or heterozygous) Myb80 (knockout) mutation, such as a (homozygous or heterozygous) Myb80 (knockout) mutation causing or capable of causing (e.g. when homozygous) genetic male sterility, and which have a (homozygous or heterozygous) Dwarf11 (knockout) mutation, such as a (homozygous or heterozygous) Dwarf11 (knockout) mutation causing or capable of causing (e.g. when homozygous) dwarfism, such as seed dwarfism.

[0840] In certain embodiments, the methods according to the invention as described herein are methods for generating, producing, obtaining, identifying, or selecting plants or plant parts in which the Myb80 gene is (homozygously or heterozygously) knocked out or deleted, and in which the Dwarf11 gene is (homozygously or heterozygously) knocked out or deleted.

[0841] In certain embodiments, the mutation according to the invention as described herein is a nonsense or missense mutation. In certain embodiments, the mutation according to the invention as described herein is a frameshift mutation. In certain embodiments, the mutation according to the invention as described herein is an indel mutation. In certain embodiments, the mutation according to the invention as described herein is a dominant (negative) mutation. In certain embodiments, the mutation according to the invention as described herein is a recessive mutation. In certain embodiments, the mutation according to the invention as described herein is a knock-out or knock-down mutation. Preferably, the mutation is a recessive mutation.

[0842] In certain preferred embodiments, the mutation is a knockout mutation, such as a frameshift mutation, and indel, or a nonsense mutation. In certain embodiments, the Myb80 mutation is a mutation causing (or capable of causing, e.g. when homozygous) genetic male sterility. In certain embodiments, the Dwarf11 mutation is a mutation causing (or capable of causing, e.g. when homozygous) dwarfism. In certain embodiments, the Myb80 mutation is a knockout mutation, such as a frameshift mutation, and indel, or a nonsense mutation causing (or capable of causing, e.g. when homozygous) genetic male sterility. In certain embodiments, the Dwarf11 mutation is a knockout mutation, such as a frameshift mutation, and indel, or a nonsense mutation causing (or capable of causing, e.g. when homozygous) dwarfism.

[0843] In certain embodiments, the mutation according to the invention as described herein is in the coding sequence, a splicing signal, or a regulatory element, such as a promoter or a sequence affecting the expression or function of said coding sequence, a splicing signal, or a regulatory element. In certain embodiments, the mutation according to the invention as described herein is in the first exon. As used herein, the first exon is the most 5′ exon. In certain embodiments, the mutation according to the invention as described herein is in the first coding exon. As used herein, the first coding exon is the exon containing the start codon. The skilled person will understand that the first coding exon may not necessarily be the first exon.

[0844] Mutations can be introduced by any means known in the art, for instance as described herein elsewhere (e.g. knockout or knockdown mutations by random or site-directed mutagenesis, including CRISPR/Cas, ZFN, TALEN, meganucleases, RNAi, TILLING, etc.). In certain embodiments, the mutation according to the invention as described herein is introduced by mutagenesis. In certain embodiments, the mutation according to the invention as described herein is introduced by random mutagenesis, preferably TILLING. In certain embodiments, the mutation according to the invention as described herein is introduced by TILLING. In certain embodiments, the mutation according to the invention as described herein is introduced by non-random mutagenesis. In certain embodiments, the mutation according to the invention as described herein is introduced by site-directed mutagenesis. As used herein, site-directed mutagenesis refers to sequence-specific (or sequence-dependent) or target-specific (or target-dependent) mutagenesis, as described herein elsewhere. In certain embodiments, the mutation according to the invention as described herein is introduced by gene-editing. In certain embodiments, the mutation according to the invention as described herein is introduced by genome-editing. In certain embodiments, the mutation according to the invention as described herein is introduced by designer nucleases In certain embodiments, the mutation according to the invention as described herein is introduced by CRISPR/Cas, zinc finger nucleases, TALEN, or meganucleases, as described herein elsewhere. In certain embodiments, the mutation according to the invention as described herein is introduced by CRISPR/Cas. By means of example, gRNAs may be designed which target the Myb80 gene (preferably the first exon) or the Dwarf11 gene (preferably the first exon). CRISPR/Cas mediated gene-editing results in the generation of indels (preferably in the first exon), typically resulting in frameshifts, and a knockout of the gene.

[0845] In certain embodiments, the plants or plant parts according to the invention as described herein, or generated, produced, obtained, identified, and/or selected according to the invention as described herein, are transgenic plants or plant parts.

[0846] In certain embodiments, the mutation according to the invention as described herein is knocked-in.

[0847] In certain embodiments, the plants or plant parts according to the invention as described herein, or generated, produced, obtained, identified, and/or selected according to the invention as described herein, are from a species in which the gene pair (such as the Myb80 and Dwarf11 genes) are within 1 Mbp or 1 cM from each other (i.e. on the same chromosome, preferably on the same chromosome arm). In certain embodiments, the plants or plant parts according to the invention as described herein, or generated, produced, obtained, identified, and/or selected according to the invention as described herein, are from the family of Poaceae. In certain embodiments, the plants or plant parts according to the invention as described herein, or generated, produced, obtained, identified, and/or selected according to the invention as described herein, are from a species of the family of Poaceae in which the gene pair (such as the Myb80 and Dwarf11 genes) are within 1 Mbp or 1 cM from each other (i.e. on the same chromosome, preferably on the same chromosome arm). In certain embodiments, the plants or plant parts according to the invention as described herein, or generated, produced, obtained, identified, and/or selected according to the invention as described herein, are from the subfamily of Pooideae, Panicoideae, Chloridoideae, Pharoideae, Bambusoideae, or Oryzoideae. In certain embodiments, the plants or plant parts according to the invention as described herein, or generated, produced, obtained, identified, and/or selected according to the invention as described herein, are from a species of the subfamily of Pooideae, Panicoideae, Chloridoideae, Pharoideae, Bambusoideae, or Oryzoideae in which the gene pair (such as the Myb80 and Dwarf11 genes) are within 1 Mbp or 1 cM from each other (i.e. on the same chromosome, preferably on the same chromosome arm). In certain embodiments, the plants or plant parts according to the invention as described herein, or generated, produced, obtained, identified, and/or selected according to the invention as described herein, are from the genus Aegilops, Brachypodium, Cenchrus, Chasmanthium, Digitaria, Eleusine, Eragrostis, Hordeum, Leersia, Lolium, Miscanthus, Oropetium, Oryza, Panicum, Paspalum, Pharus, Phyllostachys, Saccharum, Secale, Setaria, Sorghum, Thinopyrum, Triticum, Urochloa, Avena, Poa, Phleum, Festuca, or Deschampsia. In certain embodiments, the plants or plant parts according to the invention as described herein, or generated, produced, obtained, identified, and/or selected according to the invention as described herein, are from a species of the genus of Aegilops, Brachypodium, Cenchrus, Chasmanthium, Digitaria, Eleusine, Eragrostis, Hordeum, Leersia, Lolium, Miscanthus, Oropetium, Oryza, Panicum, Paspalum, Pharus, Phyllostachys, Saccharum, Secale, Setaria, Sorghum, Thinopyrum, Triticum, Urochloa, Avena, Poa, Phleum, Festuca, or Deschampsia in which the gene pair (such as the Myb80 and Dwarf11 genes) are within 1 Mbp or 1 cM from each other (i.e. on the same chromosome, preferably on the same chromosome arm). In certain embodiments, the plants or plant parts according to the invention as described herein, or generated, produced, obtained, identified, and/or selected according to the invention as described herein, are from the genus Aegilops, Brachypodium, Cenchrus, Chasmanthium, Digitaria, Eleusine, Eragrostis, Hordeum, Leersia, Lolium, Miscanthus, Oropetium, Zea, Oryza, Panicum, Paspalum, Pharus, Phyllostachys, Saccharum, Secale, Setaria, Sorghum, Thinopyrum, Triticum, Urochloa, Avena, Poa, Phleum, Festuca, or Deschampsia. In certain embodiments, the plants or plant parts according to the invention as described herein, or generated, produced, obtained, identified, and/or selected according to the invention as described herein, are from the genus Aegilops, Brachypodium, Cenchrus, Chasmanthium, Digitaria, Eleusine, Eragrostis, Hordeum, Leersia, Lolium, Miscanthus, Oropetium, Oryza, Panicum, Paspalum, Pharus, Phyllostachys, Saccharum, Secale, Setaria, Sorghum, Thinopyrum, Triticum, or Urochloa. In certain embodiments, the plants or plant parts according to the invention as described herein, or generated, produced, obtained, identified, and/or selected according to the invention as described herein, are from the genus Triticum, Sorghum, Secale, Hordeum, Oryza, Avena, Aegilops, Brachypodium, Leersia, Setaria, Zea, Poa, Phleum, Lolium, Festuca, or Deschampsia. In certain embodiments, the plants or plant parts according to the invention as described herein, or generated, produced, obtained, identified, and/or selected according to the invention as described herein, are from the genus Triticum, Sorghum, Secale, Hordeum, Oryza, Avena, Aegilops, Brachypodium, Leersia, Setaria, Poa, Phleum, Lolium, Festuca, or Deschampsia. In certain embodiments, the plants or plant parts according to the invention as described herein, or generated, produced, obtained, identified, and/or selected according to the invention as described herein, are from the genus Triticum, Sorghum, Secale, Hordeum, Oryza, Avena, Aegilops, Brachypodium, Leersia, or Setaria, In certain embodiments, the plants or plant parts according to the invention as described herein, or generated, produced, obtained, identified, and/or selected according to the invention as described herein, are from the genus Triticum, Sorghum, Hordeum, Oryza, Aegilops, Brachypodium, Leersia, or Setaria, In certain embodiments, the plants or plant parts according to the invention as described herein, or generated, produced, obtained, identified, and/or selected according to the invention as described herein, are from the species Aegilops tauschii, Brachypodium distachyon, Brachypodium mexicanum, Brachypodium stacei, Brachypodium sylvaticum, Cenchrus purpureus, Chasmanthium laxum, Digitaria exilis, Eleusine coracana, Eleusine coracana, Eragrostis curvula, Eragrostis tef, Hordeum vulgare, Leersia perrieri, Lolium perenne, Miscanthus sinensis, Oropetium thomaeum, Oryza alta, Oryza brachyantha, Oryza glaberrima, Oryza glumipatula, Oryza longistaminata, Oryza meridionalis, Oryza nivara, Oryza punctata, Oryza rufipogon, Oryza sativa Indica Group, Oryza sativa Japonica Group, Panicum hallii FIL2, Panicum hallii HAL2, Panicum virgatum, Panicum virgatum, Paspalum vaginatum, Pharus latifolius, Phyllostachys edulis, Saccharum spontaneum, Secale cereale, Setaria italica, Setaria viridis, Sorghum bicolor, Thinopyrum intermedium, Triticum aestivum, Triticum dicoccoides, Triticum spelta, Triticum turgidum, or Urochloa fusca. In certain embodiments, the plants or plant parts according to the invention as described herein, or generated, produced, obtained, identified, and/or selected according to the invention as described herein, are from the species Triticum aestivum, Aegilops tauschii, Brachypodium distachyon, Hordeum vulgare, Leersia perrieri, Oryza barthii, Oryza brachyantha, Oryza glaberrima, Oryza glumipatula, Oryza longistaminata, Oryza meridionalis, Oryza nivara, Oryza punctata, Oryza rufipogon, Oryza sativa Indica Group, Oryza sativa Japonica Group, Setaria italica, Sorghum bicolor, Avena sativa, and Triticum dicoccoides. In certain embodiments, the plants or plant parts according to the invention as described herein, or generated, produced, obtained, identified, and/or selected according to the invention as described herein, are from the species Triticum aestivum, Aegilops tauschii, Brachypodium distachyon, Hordeum vulgare, Leersia perrieri, Oryza barthii, Oryza brachyantha, Oryza glaberrima, Oryza glumipatula, Oryza longistaminata, Oryza meridionalis, Oryza nivara, Oryza punctata, Oryza rufipogon, Oryza sativa Indica Group, Oryza sativa Japonica Group, Setaria italica, Sorghum bicolor, Avena sativa, and Triticum dicoccoides. In certain embodiments, the plants or plant parts according to the invention as described herein, or generated, produced, obtained, identified, and/or selected according to the invention as described herein, are from the species Triticum aestivum, Aegilops tauschii, Brachypodium distachyon, Hordeum vulgare, Leersia perrieri, Oryza barthii, Oryza brachyantha, Oryza glaberrima, Oryza glumipatula, Oryza longistaminata, Oryza meridionalis, Oryza nivara, Oryza punctata, Oryza rufipogon, Oryza sativa Indica Group, Oryza sativa Japonica Group, Setaria italica, Sorghum bicolor, and Triticum dicoccoides. In certain embodiments, the plants or plant parts according to the invention as described herein, or generated, produced, obtained, identified, and/or selected according to the invention as described herein, are not from the genus Zea. In certain embodiments, the plants or plant parts according to the invention as described herein, or generated, produced, obtained, identified, and/or selected according to the invention as described herein, are not from the species Zea mays. In certain embodiments, the plants or plant parts according to the invention as described herein, or generated, produced, obtained, identified, and/or selected according to the invention as described herein, are not from the species Triticum urartu.

[0848] In certain embodiments, the plant or plant part according to the invention as described herein, or generated, produced, obtained, identified, and/or selected according to the invention as described herein, is a crop plant or crop plant part. In certain embodiments, the plant or plant part according to the invention as described herein, or generated, produced, obtained, identified, and/or selected according to the invention as described herein, is a turf grass.

[0849] In certain embodiments, the plants or plant parts according to the invention as described herein, or generated, produced, obtained, identified, and/or selected according to the invention as described herein, are from a species comprising the gene pair, such as Myb80 and Dwarf11, on the same chromosome. In certain embodiments, the plants or plant parts according to the invention as described herein, or generated, produced, obtained, identified, and/or selected according to the invention as described herein, are from a species comprising the gene pair, such as Myb80 and Dwarf11, on the same chromosome arm. In certain embodiments, the plants or plant parts according to the invention as described herein, or generated, produced, obtained, identified, and/or selected according to the invention as described herein, are from a species comprising the gene pair, such as Myb80 and Dwarf11, on the same chromosome within 1 cM from each other. In certain embodiments, the plants or plant parts according to the invention as described herein, or generated, produced, obtained, identified, and/or selected according to the invention as described herein, are from a species comprising the gene pair, such as Myb80 and Dwarf11, on the same chromosome within 1 Mbp from each other. In certain embodiments, the plants or plant parts according to the invention as described herein, or generated, produced, obtained, identified, and/or selected according to the invention as described herein, are from a species comprising the gene pair, such as Myb80 and Dwarf11, on the same chromosome arm within 1 cM from each other. In certain embodiments, the plants or plant parts according to the invention as described herein, or generated, produced, obtained, identified, and/or selected according to the invention as described herein, are from a species comprising the gene pair, such as Myb80 and Dwarf11, on the same chromosome arm within 1 Mbp from each other.

[0850] In certain embodiments, in the plants or plant parts according to the invention as described herein, or generated, produced, obtained, identified, and/or selected according to the invention as described herein, the genetic distance between the gene pair, such as Myb80 and Dwarf11, is at most 1 cM (on the same chromosome arm). In certain embodiments, in the plants or plant parts according to the invention as described herein, or generated, produced, obtained, identified, and/or selected according to the invention as described herein, the physical distance between the gene pair, such as Myb80 and Dwarf11, is at most 1 Mbp (on the same chromosome arm).

[0851] In certain embodiments, the gene pair, such as Myb80 and Dwarf11, are on the same chromosome. In certain embodiments, the gene pair, such as Myb80 and Dwarf11, are on the same chromosome arm. In certain embodiments, the gene pair, such as Myb80 and Dwarf11, are on the same chromosome within 1 cM from each other. In certain embodiments, the gene pair, such as Myb80 and Dwarf11, are on the same chromosome within 1 Mbp from each other. In certain embodiments, the gene pair, such as Myb80 and Dwarf11, are on the same chromosome arm within 1 cM from each other. In certain embodiments, the gene pair, such as Myb80 and Dwarf11, are on the same chromosome arm within 1 Mbp from each other.

[0852] In certain embodiments, the genetic distance between the gene pair, such as Myb80 and Dwarf11, is at most 1 cM (are on the same chromosome arm). In certain embodiments, the physical distance between the gene pair, such as Myb80 and Dwarf11, is at most 1 Mbp (are on the same chromosome arm).

[0853] In an aspect, the invention relates to a method for developing an assay to (phenotypically) detect a (allele of a) gene of interest in a plant or plant part, comprising screening for the presence of genes located at most 1 Mbp up-of downstream in the chromosome, preferably on the same chromosome arm, comprising said gene of interest, and selecting a gene causing or capable of causing a (allele-dependent or allele-specific) phenotype in a plant or plant part (as a proxy for (i.e. in lieu of) (phenotypically) detecting said gene (allele) of interest).

[0854] In an aspect, the invention relates to a method for developing an assay to phenotypically detect a (allele of a) gene of interest in a plant or plant part, comprising screening for the presence of genes located at most 1 Mbp up-of downstream in the chromosome, preferably on the same chromosome arm, comprising said gene of interest, and selecting a gene causing or capable of causing a allele-dependent or allele-specific phenotype in a plant or plant part (as a proxy for (i.e. in lieu of) (phenotypically) detecting said gene (allele) of interest).

[0855] In an aspect, the invention relates to a method for developing an assay to (phenotypically) detect a (allele of a) gene of interest in a plant or plant part, comprising screening for the presence of genes located at most 1 cM up-of downstream in the chromosome, preferably on the same chromosome arm, comprising said gene of interest, and selecting a gene causing or capable of causing a (allele-dependent or allele-specific) phenotype in a plant or plant part (as a proxy for (i.e. in lieu of) (phenotypically) detecting said gene (allele) of interest).

[0856] In an aspect, the invention relates to a method for developing an assay to phenotypically detect a (allele of a) gene of interest in a plant or plant part, comprising screening for the presence of genes located at most 1 cM up-of downstream in the chromosome, preferably on the same chromosome arm, comprising said gene of interest, and selecting a gene causing or capable of causing a allele-dependent or allele-specific phenotype in a plant or plant part (as a proxy for (i.e. in lieu of) (phenotypically) detecting said gene (allele) of interest).

[0857] In certain embodiments, said allele of said gene of interest is recessive. In certain embodiments, said allele-dependent or allele-specific phenotype is recessive. In certain embodiments, said allele of said gene of interest and said allele-dependent or allele-specific phenotype is recessive.

[0858] In certain embodiments, said gene of interest is an allele-dependent or allele-specific male or female sterility gene, preferably a male sterility gene. In certain embodiments, said gene of interest is an allele-dependent or allele-specific genetic male or female sterility gene, preferably a genetic male sterility gene.

[0859] In certain embodiments, said allele-dependent or allele-specific phenotype is an allele-dependent or allele-specific morphological or colour phenotype or trait, as described herein elsewhere.

[0860] Preferably, according to the invention, the identification or selection of plants or plant parts is a phenotypic identification or selection. Plants or plant parts are identified or selected based on a particular phenotype, associated with an underlying genotype. Accordingly, screening for a particular genotype, such as the presence of a particular gene or gene allele, mutation, gene knockout, etc. preferably encompasses phenotypic screening. The present invention relates to gene pairs, in particular linked genes (such as having a genetic distance of at most 1 cM or a physical distance of at most 1 Mbp, as described herein elsewhere), of which one of the genes confers a desired phenotype, such as genetic male or female sterility, as described herein elsewhere, and of which the other gene confers an easily identifiable phenotype, such as dwarfism, as described herein elsewhere. Accordingly, identification or selection based on the easily identifiable phenotype equally identifies or selects the desired phenotype. As used herein, phenotypic screening refers to screening for a particular phenotype. As used herein, phenotypic selection refers to selection of a particular phenotype. As used herein, phenotypic identification refers to identification of a particular phenotype.

[0861] In certain embodiments, screening for the presence of, identifying, or selecting a (homozygous) Myb80 mutation (e.g. in a plant or plant part) encompasses screening for the presence of, identifying, or selecting a (homozygous) Dwarf11 mutation (e.g. in a plant or plant part), and vice versa.

[0862] In certain embodiments, screening for the presence of, identifying, or selecting genetic male sterility (e.g. in a plant or plant part) encompasses screening for the presence of, identifying, or selecting dwarfism (e.g. in a plant or plant part), and vice versa.

[0863] In certain embodiments, screening for the presence of, identifying, or selecting a (homozygous) Myb80 mutation (e.g. in a plant or plant part) encompasses screening for the presence of, identifying, or selecting dwarfism (e.g. in a plant or plant part), and vice versa.

[0864] In certain embodiments, screening for the presence of, identifying, or selecting genetic male sterility (e.g. in a plant or plant part) encompasses screening for the presence of, identifying, or selecting a (homozygous) Dwarf11 mutation (e.g. in a plant or plant part), and vice versa.

[0865] As used herein, phenotypic screening, selection, or identification may be based on any phenotype, preferably any readily identifiable phenotype. In certain embodiments, phenotypic screening, selection, or identification is based on a morphological phenotype, such as plant height or leaf length, plant or plant part shape, plant part weight, such as seed weight (as can advantageously be determined for instance as 1000 kernel weight), etc. In certain embodiments, phenotypic screening, selection, or identification is based on a colour phenotype, such as plant or plant part colour, for instance seed or grain colour, leaf colour, etc. In certain embodiments, phenotypic screening, selection, or identification is based on plant grain/seed size, grain/seed shape, or grain/seed weight. In certain embodiments, phenotypic screening, selection, or identification is based on plant height. In certain embodiments, phenotypic screening, selection, or identification is based on average plant grain/seed size, grain/seed shape, or grain/seed weight. In certain embodiments, phenotypic screening, selection, or identification is based on average plant height. In certain embodiments, phenotypic screening, selection, or identification is based on individual plant grain/seed size, grain/seed shape, or grain/seed weight. In certain embodiments, phenotypic screening, selection, or identification is based on individual plant height. In certain embodiments, plant height is determined as the height of the plant from the base of the culm or from the crown to the tip of the flag leaf or the tip of the flower/inflorescence/panicle/raceme/spike/seedhead.

[0866] In certain embodiments plants, such as genetic male sterile plants, are selected which are at least 5%, preferably at least 8%, more preferably at least 10% shorter than plants which are not genetic male sterile. As a reference, the plant height can be compared to average plant height of plants which are not genetic male sterile. In certain embodiments plants, such as genetic male sterile plants, are selected of which the height is at least 5%, preferably at least 8%, more preferably at least 10% less than the average height of plants which are not genetic male sterile (e.g. plants not having a (homozygous) Myb80 (knockout) mutation).

[0867] In certain embodiments plants, such as dwarfism plants, are selected which are at least 5%, preferably at least 8%, more preferably at least 10% shorter than plants which do not exhibit dwarfism. As a reference, the plant height can be compared to average plant height of plants which do not exhibit dwarfism. In certain embodiments plants, such as genetic male sterile plants, are selected of which the height is at least 5%, preferably at least 8%, more preferably at least 10% less than the average height of plants which do not exhibit dwarfism (e.g. plants not having a (homozygous) Dwarf11 (knockout) mutation).

[0868] In certain embodiments seeds of plants, such as seeds of genetic male sterile plants, are selected which are at least 5%, preferably at least 8%, more preferably at least 10% shorter (i.e. have a shorter length) than seeds of plants which are not genetic male sterile. As a reference, the seed length can be compared to average seed length of seeds from plants which are not genetic male sterile. In certain embodiments seeds of plants, such as seeds of genetic male sterile plants, are selected of which the length is at least 5%, preferably at least 8%, more preferably at least 10% less than the average length of seeds of plants which are not genetic male sterile (e.g. plants not having a (homozygous) Myb80 (knockout) mutation).

[0869] In certain embodiments seeds of plants, such as seeds of dwarfism plants, are selected which are at least 5%, preferably at least 8%, more preferably at least 10% shorter (i.e. have a shorter length) than seeds of plants which do not exhibit dwarfism. As a reference, the seed length can be compared to average seed length of plants which do not exhibit dwarfism. In certain embodiments seeds of plants, such as seeds of genetic male sterile plants, are selected of which the length is at least 5%, preferably at least 8%, more preferably at least 10% less than the average length of seeds of plants which do not exhibit dwarfism (e.g. plants not having a (homozygous) Dwarf11 (knockout) mutation).

[0870] In certain embodiments seeds of plants, such as seeds of genetic male sterile plants, are selected which are at least 5%, preferably at least 8%, more preferably at least 10% lighter (i.e. have a lower weight) than seeds of plants which are not genetic male sterile. As a reference, the seed weight can be compared to average seed weight of seeds from plants which are not genetic male sterile. In certain embodiments seeds of plants, such as seeds of genetic male sterile plants, are selected of which the weight is at least 5%, preferably at least 8%, more preferably at least 10% less than the average weight of seeds of plants which are not genetic male sterile (e.g. plants not having a (homozygous) Myb80 (knockout) mutation).

[0871] In certain embodiments seeds of plants, such as seeds of dwarfism plants, are selected which are at least 4%, preferably at least 6%, more preferably at least 8% lighter (i.e. have a lower weight) than seeds of plants which do not exhibit dwarfism. As a reference, the seed weight can be compared to average seed weight of plants which do not exhibit dwarfism. In certain embodiments seeds of plants, such as seeds of genetic male sterile plants, are selected of which the weight is at least 4%, preferably at least 6%, more preferably at least 8% less than the average weight of seeds of plants which do not exhibit dwarfism (e.g. plants not having a (homozygous) Dwarf11 (knockout) mutation).

[0872] In certain embodiments plants, such as genetic male sterile plants, are selected which have a plant height less than a threshold. As a threshold, the plant height can be the average plant height of (reference) plants which are not genetic male sterile. In certain embodiments plants, such as genetic male sterile plants, are selected of which the height is less than a threshold, which is the average height of (reference) plants which are not genetic male sterile (e.g. plants not having a (homozygous) Myb80 (knockout) mutation).

[0873] In certain embodiments plants, such as dwarfism plants, are selected which have a height less than a threshold. As a threshold, the plant height can be the average plant height of (reference) plants which do not exhibit dwarfism. In certain embodiments plants, such as genetic male sterile plants, are selected of which the height is less than a threshold, which is the average height of (reference) plants which do not exhibit dwarfism (e.g. plants not having a (homozygous) Dwarf11 (knockout) mutation).

[0874] In certain embodiments seeds of plants, such as genetic male sterile plants, are selected which have a seed length less than a threshold. As a threshold, the seed length can be the average seed length of (reference) plants which are not genetic male sterile. In certain embodiments seeds of plants, such as seeds of genetic male sterile plants, are selected of which the seed length is less than a threshold, which is the average seed lengths of (reference) plants which are not genetic male sterile (e.g. plants not having a (homozygous) Myb80 (knockout) mutation).

[0875] In certain embodiments seeds of plants, such as dwarfism plants, are selected which have a seed length less than a threshold. As a threshold, the seed length can be the average seed length of (reference) plants which do not exhibit dwarfism. In certain embodiments seeds of plants, such as seeds of genetic male sterile plants, are selected of which the seed length is less than a threshold, which is the average seed length of (reference) plants which do not exhibit dwarfism (e.g. plants not having a (homozygous) Dwarf11 (knockout) mutation).

[0876] In certain embodiments seeds of plants, such as genetic male sterile plants, are selected which have a seed weight less than a threshold. As a threshold, the seed weight can be the average seed weight of (reference) plants which are not genetic male sterile. In certain embodiments seeds of plants, such as seeds of genetic male sterile plants, are selected of which the seed weight is less than a threshold, which is the average seed weight of (reference) plants which are not genetic male sterile (e.g. plants not having a (homozygous) Myb80 (knockout) mutation).

[0877] In certain embodiments seeds of plants, such as dwarfism plants, are selected which have a seed weight less than a threshold. As a threshold, the seed weight can be the average seed weight of (reference) plants which do not exhibit dwarfism. In certain embodiments seeds of plants, such as seeds of genetic male sterile plants, are selected of which the seed weight is less than a threshold, which is the average seed weight of (reference) plants which do not exhibit dwarfism (e.g. plants not having a (homozygous) Dwarf11 (knockout) mutation).

[0878] As a reference plant or plant part, an isogenic line may be used, i.e. a plant otherwise identical apart from the (homozygous) Dwarf11 and/or Myb80 (knockout) mutation, as referred to herein elsewhere.

[0879] In certain embodiments, the plants or plant parts according to the invention as described herein, or generated, produced, obtained, identified, and/or selected according to the invention as described herein can be used in hybrid breeding or for generating hybrid plants or plant part, such as hybrid seeds. Accordingly, in an aspect, the invention relates to the use of the plants or plant parts according to the invention as described herein, or generated, produced, obtained, identified, and/or selected according to the invention as described herein in hybrid breeding, or for generating hybrid plants or plant parts, such as hybrid seeds.

[0880] In an aspect, the invention relates to a polynucleotide having, comprising, consisting (essentially) of, or comprised in or encoding a sequence as set forth in any of SEQ ID NOs: 1-392, a (unique) fragment thereof, or the complement or reverse complement thereof. In an aspect, the invention relates to a polynucleotide having, comprising, consisting (essentially) of, or comprised in or encoding a sequence which is at least 80%, at least 85%, at least 90%, at least 95%, at least 96%), at least 97%, at least 98%, or at least 99% identical to a sequence as set forth in any of SEQ ID NOs: 1-392, a (unique) fragment thereof, or the complement or reverse complement thereof. Fragments preferably are at least 15 nucleotides, more preferably at least 18 nucleotides, most preferably at least 20 nucleotides.

[0881] In an aspect, the invention relates to a polynucleotide having, comprising, consisting (essentially) of, or comprised in or encoding a sequence as set forth in any of SEQ ID NOs: 1-4 or 115-392, a (unique) fragment thereof, or the complement or reverse complement thereof. In an aspect, the invention relates to a polynucleotide having, comprising, consisting (essentially) of, or comprised in or encoding a sequence which is at least 80%, at least 85%, at least 90%, at least 95%, at least 96%), at least 97%, at least 98%, or at least 99% identical to a sequence as set forth in any of SEQ ID NOs: 1-4 or 115-392, a (unique) fragment thereof, or the complement or reverse complement thereof. Fragments preferably are at least 15 nucleotides, more preferably at least 18 nucleotides, most preferably at least 20 nucleotides.

[0882] In an aspect, the invention relates to a polynucleotide having, comprising, consisting (essentially) of, or comprised in or encoding a sequence as set forth in any of SEQ ID NOs: 5-114, a (unique) fragment thereof, or the complement or reverse complement thereof. In an aspect, the invention relates to a polynucleotide having, comprising, consisting (essentially) of, or comprised in or encoding a sequence which is at least 80%, at least 85%, at least 90%, at least 95%, at least 96%), at least 97%, at least 98%, or at least 99% identical to a sequence as set forth in any of SEQ ID NOs: 5-114, a (unique) fragment thereof, or the complement or reverse complement thereof. Fragments preferably are at least 15 nucleotides, more preferably at least 18 nucleotides, most preferably at least 20 nucleotides. In certain embodiments, the polynucleotide is or is comprised in a guide RNA (gRNA), preferably a CRISPR/Cas guide RNA (gRNA). In an aspect, the invention relates to a guide RNA (gRNA), preferably a CRISPR/Cas guide RNA (gRNA) comprising a (spacer) sequence as set forth in any of SEQ ID NOs: 5-114. In an aspect, the invention relates to a guide RNA (gRNA), preferably a CRISPR/Cas guide RNA (gRNA) comprising a (spacer) sequence which is at least 80%, at least 85%, at least 90%, at least 95%, at least 96%), at least 97%, at least 98%, or at least 99% identical to a sequence as set forth in any of SEQ ID NOs: 5-114.

[0883] In an aspect, the invention relates to a polynucleotide having, comprising, consisting (essentially) of, or comprised in or encoding a sequence as set forth in any of SEQ ID NOs: 5-95, a (unique) fragment thereof, or the complement or reverse complement thereof. In an aspect, the invention relates to a polynucleotide having, comprising, consisting (essentially) of, or comprised in or encoding a sequence which is at least 80%, at least 85%, at least 90%, at least 95%, at least 96%), at least 97%, at least 98%, or at least 99% identical to a sequence as set forth in any of SEQ ID NOs: 5-95, a (unique) fragment thereof, or the complement or reverse complement thereof. Fragments preferably are at least 15 nucleotides, more preferably at least 18 nucleotides, most preferably at least 20 nucleotides. In certain embodiments, the polynucleotide is or is comprised in a guide RNA (gRNA), preferably a CRISPR/Cas guide RNA (gRNA). In an aspect, the invention relates to a guide RNA (gRNA), preferably a CRISPR/Cas guide RNA (gRNA) comprising a (spacer) sequence as set forth in any of SEQ ID NOs: 5-95. In an aspect, the invention relates to a guide RNA (gRNA), preferably a CRISPR/Cas guide RNA (gRNA) comprising a (spacer) sequence which is at least 80%, at least 85%, at least 90%, at least 95%, at least 96%), at least 97%, at least 98%, or at least 99% identical to a sequence as set forth in any of SEQ ID NOs: 5-95.

[0884] In an aspect, the invention relates to a polynucleotide having, comprising, consisting (essentially) of, or comprised in or encoding a sequence as set forth in any of SEQ ID NOs: 96-114, a (unique) fragment thereof, or the complement or reverse complement thereof. In an aspect, the invention relates to a polynucleotide having, comprising, consisting (essentially) of, or comprised in or encoding a sequence which is at least 80%, at least 85%, at least 90%, at least 95%, at least 96%), at least 97%, at least 98%, or at least 99% identical to a sequence as set forth in any of SEQ ID NOs: 96-114, a (unique) fragment thereof, or the complement or reverse complement thereof. Fragments preferably are at least 15 nucleotides, more preferably at least 18 nucleotides, most preferably at least 20 nucleotides. In certain embodiments, the polynucleotide is or is comprised in a guide RNA (gRNA), preferably a CRISPR/Cas guide RNA (gRNA). In an aspect, the invention relates to a guide RNA (gRNA), preferably a CRISPR/Cas guide RNA (gRNA) comprising a (spacer) sequence as set forth in any of SEQ ID NOs: 96-114. In an aspect, the invention relates to a guide RNA (gRNA), preferably a CRISPR/Cas guide RNA (gRNA) comprising a (spacer) sequence which is at least 80%, at least 85%, at least 90%, at least 95%, at least 96%), at least 97%, at least 98%, or at least 99% identical to a sequence as set forth in any of SEQ ID NOs: 96-114.

[0885] In an aspect, the invention relates to a polynucleotide having, comprising, consisting (essentially) of, or comprised in or encoding a sequence as set forth in any of SEQ ID NOs: 115, 116, 117, 118, 119, 120, 121, 122, 123, 124, 125, 126, 127, 128, 129, 130, 131, 132, 133, 134, 135, 136, 137, 138, 139, 140, 141, 142, 143, 144, 145, 146, 147, 148, 149, 150, 151, 162, 163, 164, 169, 170, 171, 175, 176, 177, 178, 179, 180, 181, 186, 187, 188, 189, 190, 191, 192, 193, 198, 199, 200, 201, 206, 207, 208, 209, 214, 215, 216, 217, 226, 227, 228, 229, 234, 235, 236, 237, 254, 255, 256, 257, 262, 263, 264, 265, 270, 271, 272, 273, 278, 279, 280, 281, 282, 283, 284, 289, 290, 291, 292, 297, 298, 299, 300, 305, 306, 307, 308, 309, 310, 311, 312, 313, 314, 315, 316, 317, 318, 319, 320, 321, 322, 335, 336, 337, 338, 339, 340, 341, 342, 343, 344, 345, 346, 347, 348, 349, 350, 351, 352, 353, 354, 355, 356, 357, 358, 359, 360, 361, 362, 363, 364, 365, 366, 367, 368, 369, 370, 371, 372, 377, 378, 379, 380, 385, 386, 387, or 388, a (unique) fragment thereof, or the complement or reverse complement thereof. In an aspect, the invention relates to a polynucleotide having, comprising, consisting (essentially) of, or comprised in or encoding a sequence which is at least 80%, at least 85%, at least 90%, at least 95%, at least 96%), at least 97%, at least 98%, or at least 99% identical to a sequence as set forth in any of SEQ ID NOS: 115, 116, 117, 118, 119, 120, 121, 122, 123, 124, 125, 126, 127, 128, 129, 130, 131, 132, 133, 134, 135, 136, 137, 138, 139, 140, 141, 142, 143, 144, 145, 146, 147, 148, 149, 150, 151, 162, 163, 164, 169, 170, 171, 175, 176, 177, 178, 179, 180, 181, 186, 187, 188, 189, 190, 191, 192, 193, 198, 199, 200, 201, 206, 207, 208, 209, 214, 215, 216, 217, 226, 227, 228, 229, 234, 235, 236, 237, 254, 255, 256, 257, 262, 263, 264, 265, 270, 271, 272, 273, 278, 279, 280, 281, 282, 283, 284, 289, 290, 291, 292, 297, 298, 299, 300, 305, 306, 307, 308, 309, 310, 311, 312, 313, 314, 315, 316, 317, 318, 319, 320, 321, 322, 335, 336, 337, 338, 339, 340, 341, 342, 343, 344, 345, 346, 347, 348, 349, 350, 351, 352, 353, 354, 355, 356, 357, 358, 359, 360, 361, 362, 363, 364, 365, 366, 367, 368, 369, 370, 371, 372, 377, 378, 379, 380, 385, 386, 387, or 388, a (unique) fragment thereof, or the complement or reverse complement thereof. Fragments preferably are at least 15 nucleotides, more preferably at least 18 nucleotides, most preferably at least 20 nucleotides.

[0886] In an aspect, the invention relates to a polynucleotide having, comprising, consisting (essentially) of, or comprised in or encoding a sequence as set forth in any of SEQ ID NOs: 152, 153, 154, 155, 156, 157, 158, 159, 160, 161, 165, 166, 167, 168, 172, 173, 174, 182, 183, 184, 185, 194, 195, 196, 197, 202, 203, 204, 205, 210, 211, 212, 213, 218, 219, 220, 221, 222, 223, 224, 225, 230, 231, 232, 233, 238, 239, 240, 241, 242, 243, 244, 245, 246, 247, 248, 249, 250, 251, 252, 253, 258, 259, 260, 261, 266, 267, 268, 269, 274, 275, 276, 277, 285, 286, 287, 288, 293, 294, 295, 296, 301, 302, 303, 304, 323, 324, 325, 326, 327, 328, 329, 330, 331, 332, 333, 334, 373, 374, 375, 376, 381, 382, 383, 384, 389, 390, 391, or 392, a (unique) fragment thereof, or the complement or reverse complement thereof. In an aspect, the invention relates to a polynucleotide having, comprising, consisting (essentially) of, or comprised in or encoding a sequence which is at least 80%, at least 85%, at least 90%, at least 95%, at least 96%), at least 97%, at least 98%, or at least 99% identical to a sequence as set forth in any of SEQ ID NOs: 152, 153, 154, 155, 156, 157, 158, 159, 160, 161, 165, 166, 167, 168, 172, 173, 174, 182, 183, 184, 185, 194, 195, 196, 197, 202, 203, 204, 205, 210, 211, 212, 213, 218, 219, 220, 221, 222, 223, 224, 225, 230, 231, 232, 233, 238, 239, 240, 241, 242, 243, 244, 245, 246, 247, 248, 249, 250, 251, 252, 253, 258, 259, 260, 261, 266, 267, 268, 269, 274, 275, 276, 277, 285, 286, 287, 288, 293, 294, 295, 296, 301, 302, 303, 304, 323, 324, 325, 326, 327, 328, 329, 330, 331, 332, 333, 334, 373, 374, 375, 376, 381, 382, 383, 384, 389, 390, 391, or 392, a (unique) fragment thereof, or the complement or reverse complement thereof. Fragments preferably are at least 15 nucleotides, more preferably at least 18 nucleotides, most preferably at least 20 nucleotides.

[0887] In an aspect, the invention relates to a polypeptide having, comprising, consisting (essentially) of, or comprised in a sequence as set forth in any of SEQ ID NOs: 117, 120, 123, 126, 129, 132, 135, 138, 141, 144, 147, 150, 154, 157, 160, 163, 167, 170, 173, 177, 180, 184, 188, 192, 196, 200, 204, 208, 212, 216, 220, 224, 228, 232, 236, 240, 243, 246, 249, 252, 256, 260, 264, 268, 272, 276, 280, 283, 287, 291, 295, 299, 303, 307, 310, 314, 317, 321, 325, 329, 333, 337, 340, 343, 346, 349, 352, 355, 358, 362, 365, 368, 371, 375, 379, 383, 387, or 391, or a (unique) fragment thereof. In an aspect, the invention relates to a polypeptide having, comprising, consisting (essentially) of, or comprised in a sequence which is at least 80%, at least 85%, at least 90%, at least 95%, at least 96%), at least 97%, at least 98%, or at least 99% identical to a sequence as set forth in any of SEQ ID NOs: 117, 120, 123, 126, 129, 132, 135, 138, 141, 144, 147, 150, 154, 157, 160, 163, 167, 170, 173, 177, 180, 184, 188, 192, 196, 200, 204, 208, 212, 216, 220, 224, 228, 232, 236, 240, 243, 246, 249, 252, 256, 260, 264, 268, 272, 276, 280, 283, 287, 291, 295, 299, 303, 307, 310, 314, 317, 321, 325, 329, 333, 337, 340, 343, 346, 349, 352, 355, 358, 362, 365, 368, 371, 375, 379, 383, 387, or 391, or a (unique) fragment thereof. Fragments preferably are at least 15 amino acids, more preferably at least 18 amino acids, most preferably at least 20 amino acids.

[0888] In an aspect, the invention relates to a polynucleotide encoding a polypeptide having a sequence as set forth in any of SEQ ID NOs: 117, 120, 123, 126, 129, 132, 135, 138, 141, 144, 147, 150, 154, 157, 160, 163, 167, 170, 173, 177, 180, 184, 188, 192, 196, 200, 204, 208, 212, 216, 220, 224, 228, 232, 236, 240, 243, 246, 249, 252, 256, 260, 264, 268, 272, 276, 280, 283, 287, 291, 295, 299, 303, 307, 310, 314, 317, 321, 325, 329, 333, 337, 340, 343, 346, 349, 352, 355, 358, 362, 365, 368, 371, 375, 379, 383, 387, or 391, a (unique) fragment thereof, or the complement or reverse complement thereof. In an aspect, the invention relates to a polynucleotide encoding a polypeptide having a sequence which is at least 80%, at least 85%, at least 90%, at least 95%, at least 96%), at least 97%, at least 98%, or at least 99% identical to a sequence as set forth in any of SEQ ID NOs: 117, 120, 123, 126, 129, 132, 135, 138, 141, 144, 147, 150, 154, 157, 160, 163, 167, 170, 173, 177, 180, 184, 188, 192, 196, 200, 204, 208, 212, 216, 220, 224, 228, 232, 236, 240, 243, 246, 249, 252, 256, 260, 264, 268, 272, 276, 280, 283, 287, 291, 295, 299, 303, 307, 310, 314, 317, 321, 325, 329, 333, 337, 340, 343, 346, 349, 352, 355, 358, 362, 365, 368, 371, 375, 379, 383, 387, or 391, a (unique) fragment thereof, or the complement or reverse complement thereof. Fragments preferably are at least 15 nucleotides, more preferably at least 18 nucleotides, most preferably at least 20 nucleotides.

[0889] In an aspect, the invention relates to a polypeptide having, comprising, consisting (essentially) of, or comprised in a sequence as set forth in any of SEQ ID NOs: 117, 120, 123, 126, 129, 132, 135, 138, 141, 144, 147, 150, 163, 170, 177, 180, 188, 192, 200, 208, 216, 228, 236, 256, 264, 272, 280, 283, 291, 299, 307, 310, 314, 317, 321, 337, 340, 343, 346, 349, 352, 355, 358, 362, 365, 368, 371, 379, or 387, or a (unique) fragment thereof. In an aspect, the invention relates to a polypeptide having, comprising, consisting (essentially) of, or comprised in a sequence which is at least 80%, at least 85%, at least 90%, at least 95%, at least 96%), at least 97%, at least 98%, or at least 99% identical to a sequence as set forth in any of SEQ ID NOs: 117, 120, 123, 126, 129, 132, 135, 138, 141, 144, 147, 150, 163, 170, 177, 180, 188, 192, 200, 208, 216, 228, 236, 256, 264, 272, 280, 283, 291, 299, 307, 310, 314, 317, 321, 337, 340, 343, 346, 349, 352, 355, 358, 362, 365, 368, 371, 379, or 387, or a (unique) fragment thereof. Fragments preferably are at least 15 amino acids, more preferably at least 18 amino acids, most preferably at least 20 amino acids.

[0890] In an aspect, the invention relates to a polynucleotide encoding a polypeptide having a sequence as set forth in any of SEQ ID NOs: 117, 120, 123, 126, 129, 132, 135, 138, 141, 144, 147, 150, 163, 170, 177, 180, 188, 192, 200, 208, 216, 228, 236, 256, 264, 272, 280, 283, 291, 299, 307, 310, 314, 317, 321, 337, 340, 343, 346, 349, 352, 355, 358, 362, 365, 368, 371, 379, or 387, a (unique) fragment thereof, or the complement or reverse complement thereof. In an aspect, the invention relates to a polynucleotide encoding a polypeptide having a sequence which is at least 80%, at least 85%, at least 90%, at least 95%, at least 96%), at least 97%, at least 98%, or at least 99% identical to a sequence as set forth in any of SEQ ID NOs: 117, 120, 123, 126, 129, 132, 135, 138, 141, 144, 147, 150, 163, 170, 177, 180, 188, 192, 200, 208, 216, 228, 236, 256, 264, 272, 280, 283, 291, 299, 307, 310, 314, 317, 321, 337, 340, 343, 346, 349, 352, 355, 358, 362, 365, 368, 371, 379, or 387, a (unique) fragment thereof, or the complement or reverse complement thereof. Fragments preferably are at least 15 nucleotides, more preferably at least 18 nucleotides, most preferably at least 20 nucleotides.

[0891] In an aspect, the invention relates to a polypeptide having, comprising, consisting (essentially) of, or comprised in a sequence as set forth in any of SEQ ID NOs: 154, 157, 160, 167, 173, 184, 196, 204, 212, 220, 224, 232, 240, 243, 246, 249, 252, 260, 268, 276, 287, 295, 303, 325, 329, 333, 375, 383, or 391, or a (unique) fragment thereof. In an aspect, the invention relates to a polypeptide having, comprising, consisting (essentially) of, or comprised in a sequence which is at least 80%, at least 85%, at least 90%, at least 95%, at least 96%), at least 97%, at least 98%, or at least 99% identical to a sequence as set forth in any of SEQ ID NOs: 154, 157, 160, 167, 173, 184, 196, 204, 212, 220, 224, 232, 240, 243, 246, 249, 252, 260, 268, 276, 287, 295, 303, 325, 329, 333, 375, 383, or 391, or a (unique) fragment thereof. Fragments preferably are at least 15 amino acids, more preferably at least 18 amino acids, most preferably at least 20 amino acids.

[0892] In an aspect, the invention relates to a polynucleotide encoding a polypeptide having a sequence as set forth in any of SEQ ID NOs: 154, 157, 160, 167, 173, 184, 196, 204, 212, 220, 224, 232, 240, 243, 246, 249, 252, 260, 268, 276, 287, 295, 303, 325, 329, 333, 375, 383, or 391, a (unique) fragment thereof, or the complement or reverse complement thereof. In an aspect, the invention relates to a polynucleotide encoding a polypeptide having a sequence which is at least 80%, at least 85%, at least 90%, at least 95%, at least 96%), at least 97%, at least 98%, or at least 99% identical to a sequence as set forth in any of SEQ ID NOs: 154, 157, 160, 167, 173, 184, 196, 204, 212, 220, 224, 232, 240, 243, 246, 249, 252, 260, 268, 276, 287, 295, 303, 325, 329, 333, 375, 383, or 391, a (unique) fragment thereof, or the complement or reverse complement thereof. Fragments preferably are at least 15 nucleotides, more preferably at least 18 nucleotides, most preferably at least 20 nucleotides.

[0893] In certain embodiments, the Dwarf11 gene, coding sequence, or protein as referred to herein has, comprises, consists (essentially) of, or is comprised in a sequence as set forth in in any of SEQ ID NOs: 115, 116, 117, 118, 119, 120, 121, 122, 123, 124, 125, 126, 127, 128, 129, 130, 131, 132, 133, 134, 135, 136, 137, 138, 139, 140, 141, 142, 143, 144, 145, 146, 147, 148, 149, 150, 151, 162, 163, 164, 169, 170, 171, 175, 176, 177, 178, 179, 180, 181, 186, 187, 188, 189, 190, 191, 192, 193, 198, 199, 200, 201, 206, 207, 208, 209, 214, 215, 216, 217, 226, 227, 228, 229, 234, 235, 236, 237, 254, 255, 256, 257, 262, 263, 264, 265, 270, 271, 272, 273, 278, 279, 280, 281, 282, 283, 284, 289, 290, 291, 292, 297, 298, 299, 300, 305, 306, 307, 308, 309, 310, 311, 312, 313, 314, 315, 316, 317, 318, 319, 320, 321, 322, 335, 336, 337, 338, 339, 340, 341, 342, 343, 344, 345, 346, 347, 348, 349, 350, 351, 352, 353, 354, 355, 356, 357, 358, 359, 360, 361, 362, 363, 364, 365, 366, 367, 368, 369, 370, 371, 372, 377, 378, 379, 380, 385, 386, 387, or 388. In certain embodiments, the Dwarf11 gene, coding sequence, or protein as referred to herein has, comprises, consists (essentially) of, or is comprised in a sequence which is at least 80%, at least 85%, at least 90%, at least 95%, at least 96%), at least 97%, at least 98%, or at least 99% identical to a sequence as set forth in any of SEQ ID NOs: 115, 116, 117, 118, 119, 120, 121, 122, 123, 124, 125, 126, 127, 128, 129, 130, 131, 132, 133, 134, 135, 136, 137, 138, 139, 140, 141, 142, 143, 144, 145, 146, 147, 148, 149, 150, 151, 162, 163, 164, 169, 170, 171, 175, 176, 177, 178, 179, 180, 181, 186, 187, 188, 189, 190, 191, 192, 193, 198, 199, 200, 201, 206, 207, 208, 209, 214, 215, 216, 217, 226, 227, 228, 229, 234, 235, 236, 237, 254, 255, 256, 257, 262, 263, 264, 265, 270, 271, 272, 273, 278, 279, 280, 281, 282, 283, 284, 289, 290, 291, 292, 297, 298, 299, 300, 305, 306, 307, 308, 309, 310, 311, 312, 313, 314, 315, 316, 317, 318, 319, 320, 321, 322, 335, 336, 337, 338, 339, 340, 341, 342, 343, 344, 345, 346, 347, 348, 349, 350, 351, 352, 353, 354, 355, 356, 357, 358, 359, 360, 361, 362, 363, 364, 365, 366, 367, 368, 369, 370, 371, 372, 377, 378, 379, 380, 385, 386, 387, or 388.

[0894] In certain embodiments, the Myb80 gene, coding sequence, or protein as referred to herein has, comprises, consists (essentially) of, or is comprised in a sequence as set forth in in any of SEQ ID NOs: 152, 153, 154, 155, 156, 157, 158, 159, 160, 161, 165, 166, 167, 168, 172, 173, 174, 182, 183, 184, 185, 194, 195, 196, 197, 202, 203, 204, 205, 210, 211, 212, 213, 218, 219, 220, 221, 222, 223, 224, 225, 230, 231, 232, 233, 238, 239, 240, 241, 242, 243, 244, 245, 246, 247, 248, 249, 250, 251, 252, 253, 258, 259, 260, 261, 266, 267, 268, 269, 274, 275, 276, 277, 285, 286, 287, 288, 293, 294, 295, 296, 301, 302, 303, 304, 323, 324, 325, 326, 327, 328, 329, 330, 331, 332, 333, 334, 373, 374, 375, 376, 381, 382, 383, 384, 389, 390, 391, or 392. In certain embodiments, the Myb80 gene, coding sequence, or protein as referred to herein has, comprises, consists (essentially) of, or is comprised in a sequence which is at least 80%, at least 85%, at least 90%, at least 95%, at least 96%), at least 97%, at least 98%, or at least 99% identical to a sequence as set forth in any of SEQ ID NOs: 152, 153, 154, 155, 156, 157, 158, 159, 160, 161, 165, 166, 167, 168, 172, 173, 174, 182, 183, 184, 185, 194, 195, 196, 197, 202, 203, 204, 205, 210, 211, 212, 213, 218, 219, 220, 221, 222, 223, 224, 225, 230, 231, 232, 233, 238, 239, 240, 241, 242, 243, 244, 245, 246, 247, 248, 249, 250, 251, 252, 253, 258, 259, 260, 261, 266, 267, 268, 269, 274, 275, 276, 277, 285, 286, 287, 288, 293, 294, 295, 296, 301, 302, 303, 304, 323, 324, 325, 326, 327, 328, 329, 330, 331, 332, 333, 334, 373, 374, 375, 376, 381, 382, 383, 384, 389, 390, 391, or 392.

[0895] In certain embodiments, Dwarf11 comprises or consists (essentially) of a coding sequence as set forth in in any of SEQ ID NOs: 116, 119, 122, 125, 128, 131, 134, 137, 140, 143, 146, 149, 176, 179, 187, 191, 199, 207, 215, 227, 235, 255, 263, 271, 279, 282, 290, 298, 306, 309, 313, 316, 320, 336, 339, 342, 345, 348, 351, 354, 357, 361, 364, 367, 370, 378, or 386. In certain embodiments, Dwarf11 comprises or consists (essentially) of a coding sequence which is at least 80%, at least 85%, at least 90%, at least 95%, at least 96%), at least 97%, at least 98%, or at least 99% identical to a sequence as set forth in any of SEQ ID NOs: 116, 119, 122, 125, 128, 131, 134, 137, 140, 143, 146, 149, 176, 179, 187, 191, 199, 207, 215, 227, 235, 255, 263, 271, 279, 282, 290, 298, 306, 309, 313, 316, 320, 336, 339, 342, 345, 348, 351, 354, 357, 361, 364, 367, 370, 378, or 386.

[0896] In certain embodiments, Dwarf11 comprises or consists (essentially) of a genomic sequence as set forth in in any of SEQ ID NOs: 151, 164, 171, 181, 189, 193, 201, 209, 217, 229, 237, 257, 265, 273, 284, 292, 300, 311, 318, 322, 359, 372, 380, or 388. In certain embodiments, Dwarf11 comprises or consists (essentially) of a genomic sequence which is at least 80%, at least 85%, at least 90%, at least 95%, at least 96%), at least 97%, at least 98%, or at least 99% identical to a sequence as set forth in any of SEQ ID NOs: 151, 164, 171, 181, 189, 193, 201, 209, 217, 229, 237, 257, 265, 273, 284, 292, 300, 311, 318, 322, 359, 372, 380, or 388.

[0897] In certain embodiments, Dwarf11 comprises or consists (essentially) of a protein sequence as set forth in in any of SEQ ID NOs: 117, 120, 123, 126, 129, 132, 135, 138, 141, 144, 147, 150, 163, 170, 177, 180, 188, 192, 200, 208, 216, 228, 236, 256, 264, 272, 280, 283, 291, 299, 307, 310, 314, 317, 321, 337, 340, 343, 346, 349, 352, 355, 358, 362, 365, 368, 371, 379, or 387. In certain embodiments, Dwarf11 comprises or consists (essentially) of a protein sequence which is at least 80%, at least 85%, at least 90%, at least 95%, at least 96%), at least 97%, at least 98%, or at least 99% identical to a sequence as set forth in any of SEQ ID NOs: 117, 120, 123, 126, 129, 132, 135, 138, 141, 144, 147, 150, 163, 170, 177, 180, 188, 192, 200, 208, 216, 228, 236, 256, 264, 272, 280, 283, 291, 299, 307, 310, 314, 317, 321, 337, 340, 343, 346, 349, 352, 355, 358, 362, 365, 368, 371, 379, or 387.

[0898] In certain embodiments, Myb80 comprises or consists (essentially) of a coding sequence as set forth in in any of SEQ ID NOs: 153, 156, 159, 166, 183, 195, 203, 211, 219, 223, 231, 239, 242, 245, 248, 251, 259, 267, 275, 286, 294, 302, 324, 328, 332, 374, 382, or 390. In certain embodiments, Myb80 comprises or consists (essentially) of a coding sequence which is at least 80%, at least 85%, at least 90%, at least 95%, at least 96%), at least 97%, at least 98%, or at least 99% identical to a sequence as set forth in any of SEQ ID NOs: 153, 156, 159, 166, 183, 195, 203, 211, 219, 223, 231, 239, 242, 245, 248, 251, 259, 267, 275, 286, 294, 302, 324, 328, 332, 374, 382, or 390.

[0899] In certain embodiments, Myb80 comprises or consists (essentially) of a genomic sequence as set forth in in any of SEQ ID NOs: 161, 168, 174, 185, 197, 205, 213, 221, 225, 233, 253, 261, 269, 277, 288, 296, 304, 326, 330, 334, 376, 384, or 392. In certain embodiments, Myb80 comprises or consists (essentially) of a genomic sequence which is at least 80%, at least 85%, at least 90%, at least 95%, at least 96%), at least 97%, at least 98%, or at least 99% identical to a sequence as set forth in any of SEQ ID NOs: 161, 168, 174, 185, 197, 205, 213, 221, 225, 233, 253, 261, 269, 277, 288, 296, 304, 326, 330, 334, 376, 384, or 392.

[0900] In certain embodiments, Myb80 comprises or consists (essentially) of a protein sequence as set forth in in any of SEQ ID NOs: 154, 157, 160, 167, 173, 184, 196, 204, 212, 220, 224, 232, 240, 243, 246, 249, 252, 260, 268, 276, 287, 295, 303, 325, 329, 333, 375, 383, or 391. In certain embodiments, Myb80 comprises or consists (essentially) of a protein sequence which is at least 80%, at least 85%, at least 90%, at least 95%, at least 96%), at least 97%, at least 98%, or at least 99% identical to a sequence as set forth in any of SEQ ID NOs: 154, 157, 160, 167, 173, 184, 196, 204, 212, 220, 224, 232, 240, 243, 246, 249, 252, 260, 268, 276, 287, 295, 303, 325, 329, 333, 375, 383, or 391.

[0901] The skilled person will understand that according to certain embodiments the Dwarf11 and/or Myb80 gene may be mutated, such as knocked out, as a consequence of which the sequence will have been altered.

[0902] The present invention is not to be limited in scope by the specific embodiments described herein. Indeed, various modifications of the invention in addition to those described herein will become apparent to those skilled in the art from the foregoing description. Such modifications are intended to fall under the scope of the appended claims. It is further to be understood that all values may include approximates and are provided for description.

[0903] The aspects and embodiments of the invention are further supported by the following non-limiting examples. The following examples, including the experiments conducted and the results achieved, are provided for illustrative purposes only and are not constructed as limiting the present invention.

### EXAMPLES

[0904] The wheat (Triticum aestivum) genome was screened for a combination of candidate genes conferring either a male sterile phenotype or a morphological phenotype. The screening parameters were set, that the physical distance between the two genes should be less than 1 Mbp. The assumption was that this physical distance is sufficient for a close genetic linkage of the two genes, so they are supposed to be inherited as one genetic locus. Based on experiences, a physical distance of 1 Mbp would result in a genetic distance of <1 cM, meaning that the two loci are only inherited independently in less than 1%, which is negligible and in any case can still be counterselected through the use of molecular markers.

[0905] Closely linked Myb80 and Dwarf11 genes were identified (non-exhaustively) in wheat and several other species of the Poaceae family, as indicated in Table 1. Genes were identified using blast search with dwarf11 and myb 103 sequences (in EnsemblePlant, Plaza, or Phytozome, etc.) against all available monocot species with the reference versions pointed out in column “assembly”. In each of the species, both genes were located on the same chromosome within one Mb from each other. Therefore the two genes could be used as general tool for the development of hybrid systems in all cereal plant species. The minimal distance observed in the analyzed cereal plant species was 0.03 Mbp in Setaria italica whereas the maximum observed distance was 0.7 Mbp in Barley (Hordeum vulgare).

TABLE 1

| | | MYB80 | dwarf11 | | Distance |
|---|---|---|---|---|---|
| Species | Assembly | homologue | homologue | Chromosome | (Mb) |
| Aegilops | Aet_v4.0 | AET2Gv20749000 | AET2Gv20748100 | 2D | 0.17 |
| tauschii | | | | | |
| Brachypodium | Brachypodium_distachyon_v3.0 | BRADI_5g13041v3 | BRADI_5g12990v3 | 5 | 0.06 |
| distachyon | | | | | |
| Hordeum | BA_Hullen_v2 | HOVUSG0945200 | HOVUSG0946300 | scaffold | 0.7 |
| vulgare | | | | 67 | |
| Leersia perrieri | Lperr_V1.4 | LPERR04G12420 | LPERR04G12330 | 4 | 0.05 |
| Oryza | Oryza_brachyantha.v1.4b | OB04G23000 | OB04G22900 | 4 | 0.07 |
| brachyantha | | | | | |
| Oryza | Oryza_glaberrima_V1 | ORGLA04G0126700 | ORGLA04G0126200 | 4 | 0.04 |
| glaberrima | | | | | |
| Oryza | Oryza_glumaepatula_v1.5 | OGLUM04G15520 | OGLUM04G15480 | 4 | 0.04 |
| glumipatula | | | | | |
| Oryza | O_longistaminata_v1.0 | KN538714.1_FG046 | KN538714.1_FG040 | 1 | 0.04 |
| longistaminata | | | | | |
| Oryza | Oryza_meridionalis_v1.3 | OMERI04G13500 | OMERI04G13440 | 4 | 0.07 |
| meridionalis | | | | | |
| Oryza nivara | Oryza_nivara_v1.0 | ONIVA04G13800 | ONIVA04G13750 | 4 | 0.04 |
| Oryza punctata | Oryza_punctata_v1.2 | OPUNC04G13560 | OPUNC04G13510 | 4 | 0.04 |
| Oryza | OR_W1943 | ORUFI04G17000 | ORUFI04G16950 | 4 | 0.04 |
| rufipogon | | | | | |
| Oryza sativa | ASM465v1 | BGIOSGA014912 | BGIOSGA014915 | 4 | 0.04 |
| Indica Group | | | | | |
| Oryza sativa | IRGSP-1.0 | Os04g0470600 | Os04g0469800 | 4 | 0.04 |
| Japonica Group | | | | | |
| Setaria italica | Setaria_italica_v2.0 | SETIT_012130mg | SETIT_010072mg | VII | 0.03 |
| Sorghum | Sorghum_bicolor_NCBIv3 | SORBI_3006G115200 | SORBI_3006G114600 | 6 | 0.04 |
| bicolor | | | | | |
| Triticum | IWGSC | TraesCS2A02G331200 | TraesCS2A02G331800 | 2A | 0.4 |
| aestivum | | | | | |
| Triticum | IWGSC | TraesCS2B02G351000 | TraesCS2B02G350400 | 2B | 0.52 |
| aestivum | | | | | |
| Triticum | IWGSC | TraesCS2D02G331700 | TraesCS2D02G331100 | 2D | 0.16 |
| aestivum | | | | | |
| Triticum | WEWSeq_v.1.0 | TRIDC2BG050920 | TRIDC2BG050840 | 2B | 0.55 |
| dicoccoides | | | | | |
| Triticum | WEWSeq_v.1.0 | TRIDC2AG048440 | TRIDC2AG048380 | 2A | 0.39 |
| dicoccoides | | | | | |
| Eragrostis | CERZOS_E.curvula1.0 | EJB05_39175 | EJB05_39179 | Contig | 0.04 |
| curvula | | | | 30 | |
| Eragrostis tef | ASM97063v1 | Et_s9182-0.2-1.path1 | Et_s9182-0.38-1.path1 | scaffold | 0.05 |
| | | | | 9182 | |
| Panicum hallif | PHallii_v3.1 | PAHAL_7G185900 | PAHAL_7G185400 | 7 | 0.03 |
| FIL2 | | | | | |
| Panicum hallii | PhalliHAL_V2.1 | GQ55_7G177400 | GQ55_7G176900 | 7 | 0.03 |
| HAL2 | | | | | |
| Saccharum | Sspon.HiC_chr_asm | Sspon.05G0009350-1A | Sspon.05G0009380-1A | 5A | 0.02 |
| spontaneum | | | | | |
| Saccharum | Sspon.HiC_chr_asm | Sspon.05G0009350-1P | | 5C | 0.09 |
| spontaneum | | | | | |
| Saccharum | Sspon.HiC_chr_asm | Sspon.05G0009350-4D | Sspon.05G0009380-1T | 5D | 0.05 |
| spontaneum | | | | | |
| Saccharum | Sspon.HiC_chr_asm | Sspon.05G0009350-2B | | 5B | 0.07 |
| spontaneum | | | | | |
| Setaria viridis | Setaria_viridis_v2.0 | SEVIR_7G141200v2 | SEVIR_7G140700v2 | 7 | 0.03 |
| Triticum spelta | PGSBv2.0 | TraesTSP2A01G360100 | TraesTSP2A01G359500 | 2A | 0.37 |
| Triticum spelta | PGSBv2.0 | TraesTSP2B01G384300 | TraesTSP2B01G383700 | 2B | 0.53 |
| Triticum spelta | PGSBv2.0 | TraesTSP2D01G362500 | TraesTSP2D01G361800 | 2D | 0.16 |
| Triticum | Svevo.v1 | TRITD2Av1G202420 | TRITD2Av1G202210 | 2A | 0.41 |
| turgidum | | | | | |
| Triticum | Svevo.v1 | TRITD2Bv1G165690 | TRITD2Bv1G165560 | 2B | 0.52 |
| turgidum | | | | | |
| Secale cereale | RO_Lo7_hq-2018-v1p1_r1- | SECCE2Rv1G0106910.1 | SECCE2Rv1G0106850.1 | chr2R | 0.27 |
| | all_cdna.fasta | | | | |
| Urochloa fusca | v1.1 | | | Chr07 | 0.03 |
| Thinopyrum | v2.1 | | | Chr06 | 0.41 |
| intermedium | | | | | |
| Thinopyrum | v2.1 | | | scaffold_291 | 0.18 |
| intermedium | | | | | |
| Pharus | v1.1 | | | Chr06 | 0.06 |
| latifolius | | | | | |
| Paspalum | v3.1 | | | Chr06 | 0.02 |
| vaginatum | | | | | |
| Panicum | v5.1 | | | Chr07N | 0.08 |
| virgatum | | | | | |
| Panicum | v5.1 | | | Chr07K | 0.04 |
| virgatum | | | | | |
| Oropetium | v1.0 | | | Oropetium_{—} | 0.02 |
| thomaeum | | | | genomic_{—} | |
| | | | | 20141112_091 | |
| Miscanthus | v7.1 | | | Chr11 | 0.53 |
| sinensis | | | | | |
| Eleusine | v1.1 | | | 4A | 0.026 |
| coracana | | | | | |
| Eleusine | v1.1 | | | 4B | 0.051 |
| coracana | | | | | |
| Chasmanthium | v1.1 | | | Chr06 | 0.08 |
| laxum | | | | | |
| Brachypodium | v1.1 | | | chr9 | 0.078 |
| sylvaticum | | | | | |
| Brachypodium | v1.1 | | | Chr09 | 0.04 |
| stacei | | | | | |
| Brachypodium | v1.1 | | | Bm9P | 0.26 |
| mexicanum | | | | | |
| Brachypodium | v1.1 | | | Bm9U | 0.18 |
| mexicanum | | | | | |
| Lolium perenne | | | | Lp_chr2_0 | 0.49 |
| Phyllostachys | | | | hic_scaffold_24 | 0.12 |
| edulis | | | | | |
| Oryza alta | | | | GWHAZTO00000004 | 0.05 |
| Cenchrus | | | | GWHAORA00000014 | 0.11 |
| purpureus | | | | | |
| Digitaria exilis | | | | Dexi_CM05836_chr07A | 0.03 |

[0906] Illustrative (partial) cDNA and genomic sequences of Myb80 and Dwarf11 genes of several cereal species are provided in Table 2. Other representative genomic, cDNA, coding, and protein sequences of Myb80 and Dwarf11 genes in other species are provided in SEQ ID NOs: 115-392. (see also Table 3)

[0907] These sequences may serve as templates for identifying Myb80 and Dward11 genes in other species.

TABLE 2

| | | SEQ |
|---|---|---|
| Species | Sequence | ID NO |
| Oryza | > Myb80 cDNA | 1 |
| sativa | ATGGGGGGGGTGCCGTGCTGCGAGAAGGAC | |
| | AACGTGAAGCGCGGGCAGTGGACGCCCGAG | |
| | GAGGACAACAAGCTGCTCTCCTACATCACC | |
| | CAGTACGGCACCCGCAACTGGCGCCTCATC | |
| | CCCAAGAACGCCGGGTTGCAGCGGTGCGGG | |
| | AAGAGCTGCCGGCTGCGGTGGACCAACTAC | |
| | CTCCGGCCCGACCTCAAGCACGGCGAGTTC | |
| | ACCGACGCCGAGGAGCAGACCATCATCAAG | |
| | CTCCACTCCGTCGTCGGCAACAGGTGGTCG | |
| | GTGATCGCGGCGCAGCTTCCGGGGCGGACG | |
| | GACAACGACGTGAAGAACCACTGGAACACG | |
| | AAGCTGAAGAAGAAGCTGTCCGGGATGGGC | |
| | ATCGACCCCGTCACGCACAAGTCCTTCTCG | |
| | CACCTCATGGCCGAGATCGCCACCACGCTG | |
| | GCGCCGCCGCAGGTGGCGCACCTCGCCGAG | |
| | GCCGCGCTGGGGTGCTTCAAGGACGAGATG | |
| | CTCCACCTCCTCACCAAGAAGCGCCCCTCC | |
| | GACTTCCCCTCGCCCGCCGTGCACGACGGC | |
| | GCCGGCGCCGGCGCCAGCGCGTCCGCGCTC | |
| | GCCGCGCCCTGTTTCCCCGCCGCGCCGCCG | |
| | CACCACCCGCAGGCCGACGACACCATCGAG | |
| | CGCATCAAGCTCGGCCTGTCCCGCGCCATC | |
| | ATGAGCGATCCCTCCACCGCCTCCGCCGCC | |
| | GCCGCCGCCGCCGCGCCCTCCGCCCCCGCG | |
| | GAGGACAAGCCGTGGCCGCCCGGCGACATG | |
| | TCCGAGGGGCTCGCCGGGATGTACGCCACG | |
| | TACAACCCGGCGGCGCACGCGCACGCGCAG | |
| | GCCCAGGCCGAGTTCCGGTACGACGGGGCC | |
| | TCCGCGGCGCAGGGCTACGTCCTCGGCGGC | |
| | GACGGCGACCAGGGCACGTCGATGTGGAGC | |
| | CACCAGAGCCTGTACAGCGGGAGCTCCGGC | |
| | ACCGAGGAGGCCAGGCGGGAGTTGCCGGAG | |
| | AAGGGCAACGACAGCGTCGGCAGCAGCGGC | |
| | GGCGACGACGACGCCGCGGACGACGGCAAG | |
| | GACAGCGGGAAGGGGGCAGCCTCCGACATG | |
| | TCGGGCCTGTTCGCCTCCGACTGCGTGCTC | |
| | TGGGACTTGCCCGACGAGCTCACGAATCAC | |
| | ATGGTGTAG | |
| Oryza | >Myb80 genomic (LOC_Os04g39470) | 2 |
| sativa | ATTTATAACACGCGGCGCGGCCGTGTGAGC | |
| | GCCGCACGCACGCAGCAGCAGCGGAATCTC | |
| | GACGGCGGCGACATCATGGGGCGGGTGCCG | |
| | TGCTGCGAGAAGGACAACGTGAAGCGCGGG | |
| | CAGTGGACGCCCGAGGAGGACAACAAGCTG | |
| | CTCTCCTACATCACCCAGTACGGCACCCGC | |
| | AACTGGCGCCTCATCCCCAAGAACGCCGGT | |
| | ACGTTGGCGCGCGCGCCGCCACCGGCGAAC | |
| | GCGTGGTTGCAGCAGCGGCGGCGCTCTGAC | |
| | CGGGGTGTTTGTTGCTGGAACGTTGGCAGG | |
| | GTTGCAGCGGTGCGGGAAGAGCTGCCGGCT | |
| | GCGGTGGACCAACTACCTCCGGCCCGACCT | |
| | CAAGCACGGCGAGTTCACCGACGCCGAGGA | |
| | GCAGACCATCATCAAGCTCCACTCCGTCGT | |
| | CGGCAACAGGTAGGCATCAACGAGTGGTCT | |
| | CGCTACACCGTCTTGTGATCTTGGGTCATT | |
| | TTTGGAGGAATGTATTGAGCAATGCGGGAT | |
| | GGGGCTGTGTGTGGCAAGGTGGTCGGTGAT | |
| | CGCGGCGCAGCTTCCGGGGCGGACGGACAA | |
| | CGACGTGAAGAACCACTGGAACACGAAGCT | |
| | GAAGAAGAAGCTGTCCGGGATGGGCATCGA | |
| | CCCCGTCACGCACAAGTCCTTCTCGCACCT | |
| | CATGGCCGAGATCGCCACCACGCTGGCGCC | |
| | GCCGCAGGTGGCGCACCTCGCCGAGGCCGC | |
| | GCTGGGGTGCTTCAAGGACGAGATGCTCCA | |
| | CCTCCTCACCAAGAAGCGCCCCTCCGACTT | |
| | CCCCTCGCCCGCCGTGCACGACGGCGCCGG | |
| | CGCCGGCGCCAGCGCGTCCGCGCTCGCCGC | |
| | GCCCTGTTTCCCCGCCGCGCCGCCGCACCA | |
| | CCCGCAGGCCGACGACACCATCGAGCGCAT | |
| | CAAGCTCGGCCTGTCCCGCGCCATCATGAG | |
| | CGATCCCTCCACCGCCTCCGCCGCCGCCGC | |
| | CGCCGCCGCGCCCTCCGCCCCCGCGGAGGA | |
| | CAAGCCGTGGCCGCCCGGCGACATGTCCGA | |
| | GGGGCTCGCCGGGATGTACGCCACGTACAA | |
| | CCCGGCGGCGCACGCGCACGCGCAGGCCCA | |
| | GGCCGAGTTCCGGTACGACGGGGCCTCCGC | |
| | GGCGCAGGGCTACGTCCTCGGCGGCGACGG | |
| | CGACCAGGGCACGTCGATGTGGAGCCACCA | |
| | GAGCCTGTACAGCGGGAGCTCCGGCACCGA | |
| | GGAGGCCAGGCGGGAGTTGCCGGAGAAGGG | |
| | CAACGACAGCGTCGGCAGCAGCGGCGGCGA | |
| | CGACGACGCCGCGGACGACGGCAAGGACAG | |
| | CGGGAAGGGGGCAGCCTCCGACATGTCGGG | |
| | CCTGTTCGCCTCCGACTGCGTGCTCTGGGA | |
| | CTTGCCCGACGAGCTCACGAATCACATGGT | |
| | GTAGCTAAGCTATAAAACGCGGGAAAACTT | |
| | AGCACGGCGAAGCACGCCATGATCCACATC | |
| | ACTTGCAGTTGCAGGTGGTGAGAATTGGAT | |
| | AGAGCGAAAAATTGCTACCAATAATATTGC | |
| | TGAAAGAGTGACAGAAAAAGTGAAAAACTA | |
| | TAGTATGTAGCTGGCAAGAAAAATGGGGAT | |
| | TCTTTTTGCTTGGAAAAGAGAAAAAAAAGT | |
| | GAGATGTGAATAGTTTTACCGAGAAGCA | |
| Triticum | >Myb80 cDNA | 3 |
| aestivum | CAAGCGCCGCACGCCGATCGAAAACTCAGT | |
| | CGCTCGAACACTCACCCAGCAAGAACGCAG | |
| | CGCCAGCGACGTATCGGCCTACCGGAAAGC | |
| | GGAGCCTCCACGACGGATCCCGTGCGCGCG | |
| | CAGGGCGGTCCGGGAGGCGGAGGCGCCGAC | |
| | ATGGGCCGGATCCCGTGCTGCGAGAAGGAC | |
| | AACGTGAAGCGCGGGCAGTGGACGCCCGAG | |
| | GAGGACAACAAGCTGCTCTCCTACATCACG | |
| | CAGCACGGCACGCGCAACTGGCGCCTCATC | |
| | CCCAAGAACGCCGGGCTGCAGCGATGCGGG | |
| | AAGAGCTGCCGGCTGCGGTGGACCAACTAC | |
| | CTGCGGCCCGACCTCAAGCACGGCGAGTTC | |
| | ACTGACGCCGAGGAGCAGACCATCATCAAG | |
| | CTGCACTCCGTCGTCGGCAACAGGTGGTCG | |
| | GTGATCGCGGCCCAGCTGCCGGGGCGGACG | |
| | GACAACGACGTCAAGAACCACTGGAACACC | |
| | AAGCTCAAGAAGAAGCTGTCCGGGATGGGC | |
| | ATCGACCCCGTCACGCACAAGTCCTTCTCG | |
| | CACCTCATGGCCGAGATCGCCACCACGCTC | |
| | GCCCCGCCGCAGGTGGCGCACCTCGCCGAG | |
| | GCCGCCCTGGGGTGCTTCAAGGACGAGATG | |
| | CTCCACCTCCTCACCAAGAAGCGCCCCACC | |
| | GACTTCCCCTCGCCCGCCATGCCCGACACG | |
| | GCGGCGGGCGCCAGCGCGGGCATGGCCATG | |
| | GGCCCGGGCGCGCACATCGCGCCCTGCTAC | |
| | GCCGCGCCGCCACAAGCCGACGACACCATC | |
| | GAGCGCATCAAGATGGGCCTGTCCCGCGCC | |
| | ATCATGAGCGAGCCCGCCGCTCCCGCGGCC | |
| | GACAAGCCGTGGCCATCGGGCGACATGTCC | |
| | GAGGGGCTGGCCGGCATGTACGCCGCGTTC | |
| | AACCCCGCGCAGGCGACGGAGTTCCGGTAC | |
| | GAAGGGACGGCGTCGGGGTACGTCCTTGGG | |
| | GGCGACGGCGACCAGGGCACGTCGATGTGG | |
| | AGCCACCACAGCATGTACAGCGGGAGCTCC | |
| | GGCACCGAGGGGGGCAGGCCGGCATTGCAG | |
| | GAAAAGGGCAACGACAGTGTCGGCAGCAGC | |
| | GGCGGCGACGAGGAGGCGGAAGACGGCAAG | |
| | GAGGGAGGGAAGGGAGCCTCCGACATGTCG | |
| | GGGCTGTTTGGATCCGATTGCGTACTCTGG | |
| | GACTTGCCCGACGAGCTGACGAATCACATG | |
| | TGTGACTAAATTCACACGGCGAGCTTAGCT | |
| | AGCATCATCGATGAACGTCAGTTCGCCGGA | |
| | GAAAAGAAAGCCTAGAGCCAAACGATTTTA | |
| | GAAGCACATAAATTTCTGACAGTGCCTGAG | |
| | AAGAGCTAGAATAAACAGGGAAACTGGAAA | |
| | ATGGCGTCCCTTCTTCTTTTTTTTCTGCGT | |
| | GCAGAACTGTTAAGTGTACATTGCTCTGCC | |
| | GCTGGCCATGCTATTTTTTGGGGGTCCTGT | |
| | CTACTGTGCTTCAGTCAAAACGACTTCAAT | |
| | TCAAACAGATTTGGTAGCATGTCAATGAAG | |
| | CTGTCTGACCGTAACATGTCAATGTTTTAG | |
| | TAAAACCGCAC | |
| Oryza | >Dwarf11 cDNA (LOC_Os04g39430) | 4 |
| sativa | ATGGTGGGAGGAGAGCTTGTGCTGGCTGCT | |
| | CTGGTGATCCTGCTTGCTTTGCTGCTGACC | |
| | CTGGTGCTGAGCCACTTCCTGCCTTTGCTC | |
| | CTGAATCCCAAGGCTCCCAAGGGAAGCTTT | |
| | GGGTGGCCTCTCCTTGGTGAGACGCTGAGG | |
| | TTCCTCAGTCCTCATGCTAGCAACACCCTG | |
| | GGCAGCTTCCTGGAGGATCACTGCTCCAGG | |
| | TATGGGAGGGTGTTTAAGTCCCATCTGTTC | |
| | TGCACCCCCACCATAGTGTCCTGTGACCAG | |
| | GAGCTGAACCACTTCATCCTTCAGAATGAG | |
| | GAGAGGCTGTTTCAGTGCAGCTACCCCAGG | |
| | CCAATTCATGGCATTCTGGGCAAGTCCTCC | |
| | ATGTTAGTGGTCCTAGGGGAGGACCACAAG | |
| | AGGCTCAGGAACCTTGCTCTAGCACTGGTC | |
| | ACCTCCACAAAGCTCAAGCCCAGCTACCTT | |
| | GGCGACATTGAGAAGATTGCACTGCATATA | |
| | GTTGGGTCATGGCATGGCAAGAGCAAGGAC | |
| | AAGGGGATGGTCAATGTCATCGCCTTCTGC | |
| | GAGGAGGCAAGAAAGTTTGCATTCAGTGTA | |
| | ATAGTGAAGCAGGTGCTGGGGCTATCACCA | |
| | GAGGAGCCGGTCACTGCCATGATACTTGAA | |
| | GATTTCCTCGCCTTCATGAAGGGTCTCATC | |
| | TCTTTCCCTCTCTACATCCCAGGGACGCCC | |
| | TATGCCAAAGCTGTGCAGGCCAGAGCGAGG | |
| | ATATCAAGCACTGTGAAGGGTATTATTGAG | |
| | GAGAGGAGGAATGCTGGCTCCAGCAACAAG | |
| | GGTGATTTCCTTGATGTGCTGCTTTCAAGC | |
| | AATGAGCTCTCTGATGAGGAGAAAGTGAGC | |
| | TTTGTGCTGGATTCCTTACTGGGAGGATAT | |
| | GAGACCACCTCACTCTTGATCTCCATGGTT | |
| | GTGTATTTCCTTGGGCAGTCAGCTCAAGAT | |
| | CTGGAACTAGTGAAGAGGGAGCATGAAGGC | |
| | ATAAGATCGAAGAAAGAGAAGGACGAGTTC | |
| | TTGAGCTCTGAAGACTATAAGAAGATGGAA | |
| | TATACCCAACATGTAAGATGA | |

TABLE 3

| | | SEQ |
|---|---|---|
| Species | Sequence | ID NO |
| Aegilops | Dwarf11 cDNA sequence - AET2Gv20748100.1 | 115 |
| tauschii | Dwarf11 coding sequence - AET2Gv20748100.1 | 116 |
| | Dwarf11 protein sequence - AET2Gv20748100.1 | 117 |
| | Dwarf11 cDNA sequence - AET2Gv20748100.9 | 118 |
| | Dwarf11 coding sequence - AET2Gv20748100.9 | 119 |
| | Dwarf11 protein sequence - AET2Gv20748100.9 | 120 |
| | Dwarf11 cDNA sequence - AET2Gv20748100.2 | 121 |
| | Dwarf11 coding sequence - AET2Gv20748100.2 | 122 |
| | Dwarf11 protein sequence - AET2Gv20748100.2 | 123 |
| | Dwarf11 cDNA sequence - AET2Gv20748100.7 | 124 |
| | Dwarf11 coding sequence - AET2Gv20748100.7 | 125 |
| | Dwarf11 protein sequence - AET2Gv20748100.7 | 126 |
| | Dwarf11 cDNA sequence - AET2Gv20748100.10 | 127 |
| | Dwarf11 coding sequence - AET2Gv20748100.10 | 128 |
| | Dwarf11 protein sequence - AET2Gv20748100.10 | 129 |
| | Dwarf11 cDNA sequence - AET2Gv20748100.8 | 130 |
| | Dwarf11 coding sequence - AET2Gv20748100.8 | 131 |
| | Dwarf11 protein sequence - AET2Gv20748100.8 | 132 |
| | Dwarf11 cDNA sequence - AET2Gv20748100.4 | 133 |
| | Dwarf11 coding sequence - AET2Gv20748100.4 | 134 |
| | Dwarf11 protein sequence - AET2Gv20748100.4 | 135 |
| | Dwarf11 cDNA sequence - AET2Gv20748100.5 | 136 |
| | Dwarf11 coding sequence - AET2Gv20748100.5 | 137 |
| | Dwarf11 protein sequence - AET2Gv20748100.5 | 138 |
| | Dwarf11 cDNA sequence - AET2Gv20748100.12 | 139 |
| | Dwarf11 coding sequence - AET2Gv20748100.12 | 140 |
| | Dwarf11 protein sequence - AET2Gv20748100.12 | 141 |
| | Dwarf11 cDNA sequence - AET2Gv20748100.11 | 142 |
| | Dwarf11 coding sequence - AET2Gv20748100.11 | 143 |
| | Dwarf11 protein sequence - AET2Gv20748100.11 | 144 |
| | Dwarf11 cDNA sequence - AET2Gv20748100.3 | 145 |
| | Dwarf11 coding sequence - AET2Gv20748100.3 | 146 |
| | Dwarf11 protein sequence - AET2Gv20748100.3 | 147 |
| | Dwarf11 cDNA sequence - AET2Gv20748100.6 | 148 |
| | Dwarf11 coding sequence - AET2Gv20748100.6 | 149 |
| | Dwarf11 protein sequence - AET2Gv20748100.6 | 150 |
| | Dwarf11 genomic sequence - | 151 |
| | Aet_v4.0:2D:422816950:422822140:1 | |
| Aegilops | Myb80 cDNA sequence - AET2Gv20749000.1 | 152 |
| tauschii | Myb80 coding sequence - AET2Gv20749000.1 | 153 |
| | Myb80 protein sequence - AET2Gv20749000.1 | 154 |
| | Myb80 cDNA sequence - AET2Gv20749000.2 | 155 |
| | Myb80 coding sequence - AET2Gv20749000.2 | 156 |
| | Myb80 protein sequence - AET2Gv20749000.2 | 157 |
| | Myb80 cDNA sequence - AET2Gv20749000.3 | 158 |
| | Myb80 coding sequence - AET2Gv20749000.3 | 159 |
| | Myb80 protein sequence - AET2Gv20749000.3 | 160 |
| | Myb80 genomic sequence - | 161 |
| | Aet_v4.0:2D:422984632:422987728:−1 | |
| Brachypodium | Dwarf11 cDNA sequence - KQJ83091 | 162 |
| distachyon | Dwarf11 protein sequence - KQJ83091 | 163 |
| | Dwarf11 genomic sequence - | 164 |
| | Brachypodium_distachyon_v3.0:5:16687949:16694228:−1 | |
| Brachypodium | Myb80 cDNA sequence - KQJ83102 | 165 |
| distachyon | Myb80 coding sequence - KQJ83102 | 166 |
| | Myb80 protein sequence - KQJ83102 | 167 |
| | Myb80 genomic sequence - | 168 |
| | Brachypodium_distachyon_v3.0:5:16741184:16744157:−1 | |
| Hordeum | Dwarf11 cDNA sequence | 169 |
| vulgare | Dwarf11 protein sequence | 170 |
| | Dwarf11 genomic sequence - | 171 |
| | HOVUSG0946300_genomic_scaffold67:5620836-5626353 | |
| Hordeum | Myb80 cDNA sequence | 172 |
| vulgare | Myb80 protein sequence | 173 |
| | Myb80 genomic sequence - | 174 |
| | HOVUSG0945200_genomic_scaffold67:4914185-4916639 | |
| Leersia perrieri | Dwarf11 cDNA sequence - LPERR04G12330.1 | 175 |
| | Dwarf11 coding sequence - LPERR04G12330.1 | 176 |
| | Dwarf11 protein sequence - LPERR04G12330.1 | 177 |
| | Dwarf11 cDNA sequence - LPERR04G12330.2 | 178 |
| | Dwarf11 coding sequence - LPERR04G12330.2 | 179 |
| | Dwarf11 protein sequence - LPERR04G12330.2 | 180 |
| | Dwarf11 genomic sequence - | 181 |
| | Lperr_V1.4:4:13356928:13362832:−1 | |
| Leersia perrieri | Myb80 cDNA sequence - LPERR04G12420.1 | 182 |
| | Myb80 coding sequence - LPERR04G12420.1 | 183 |
| | Myb80 protein sequence - LPERR04G12420.1 | 184 |
| | Myb80 genomic sequence - | 185 |
| | Lperr_V1.4:4:13405809:13408196:−1 | |
| Oryza barthii | Dwarf11 cDNA sequence - OBART04G15600.1 | 186 |
| | Dwarf11 coding sequence - OBART04G15600.1 | 187 |
| | Dwarf11 protein sequence - OBART04G15600.1 | 188 |
| | Dwarf11 genomic sequence - | 189 |
| | O.barthii_v1:4:16843786:16848824:−1 | |
| Oryza | Dwarf11 cDNA sequence - OB04G22900.1 | 190 |
| brachyantha | Dwarf11 coding sequence - OB04G22900.1 | 191 |
| | Dwarf11 protein sequence - OB04G22900.1 | 192 |
| | Dwarf11 genomic sequence - | 193 |
| | Oryza_brachyantha.v1.4b:4:11837902:11843774:−1 | |
| Oryza | Myb80 cDNA sequence - OB04G23000.1 | 194 |
| brachyantha | Myb80 coding sequence - OB04G23000.1 | 195 |
| | Myb80 protein sequence - OB04G23000.1 | 196 |
| | Myb80 genomic sequence - | 197 |
| | Oryza_brachyantha.v1.4b:4:11905173:11908285:−1 | |
| Oryza | Dwarf11 cDNA sequence - ORGLA04G0126200.1 | 198 |
| glaberrima | Dwarf11 coding sequence - ORGLA04G0126200.1 | 199 |
| | Dwarf11 protein sequence - ORGLA04G0126200.1 | 200 |
| | Dwarf11 genomic sequence - | 201 |
| | Oryza_glaberrima_V1:4:15903746:15908791:−1 | |
| Oryza | Myb80 cDNA sequence - ORGLA04G0126700.1 | 202 |
| glaberrima | Myb80 coding sequence - ORGLA04G0126700.1 | 203 |
| | Myb80 protein sequence - ORGLA04G0126700.1 | 204 |
| | Myb80 genomic sequence - | 205 |
| | Oryza_glaberrima_V1:4:15945446:15947954:−1 | |
| Oryza | Dwarf11 cDNA sequence - OGLUM04G15480.1 | 206 |
| glumipatula | Dwarf11 coding sequence - OGLUM04G15480.1 | 207 |
| | Dwarf11 protein sequence - OGLUM04G15480.1 | 208 |
| | Dwarf11 genomic sequence - | 209 |
| | Oryza_glumaepatula_v1.5:4:20865448:20870495:−1 | |
| Oryza | Myb80 cDNA sequence - OGLUM04G15520.1 | 210 |
| glumipatula | Myb80 coding sequence - OGLUM04G15520.1 | 211 |
| | Myb80 protein sequence - OGLUM04G15520.1 | 212 |
| | Myb80 genomic sequence - | 213 |
| | Oryza_glumaepatula_v1.5:4:20901294:20903799:−1 | |
| Oryza indica | Dwarf11 cDNA sequence - GIOSGA014915-TA | 214 |
| | Dwarf11 coding sequence - GIOSGA014915-TA | 215 |
| | Dwarf11 protein sequence - GIOSGA014915-TA | 216 |
| | Dwarf11 genomic sequence - | 217 |
| | ASM465v1:4:21874459:21879503:−1 | |
| Oryza indica | Myb80 cDNA sequence - BGIOSGA030830-TA | 218 |
| | Myb80 coding sequence - BGIOSGA030830-TA | 219 |
| | Myb80 protein sequence - BGIOSGA030830-TA | 220 |
| | Myb80 genomic sequence - | 221 |
| | ASM465v1:9:14727035:14731412:1 | |
| Oryza indica | Myb80 cDNA sequence - BGIOSGA014912-TA | 222 |
| | Myb80 coding sequence - BGIOSGA014912-TA | 223 |
| | Myb80 protein sequence - BGIOSGA014912-TA | 224 |
| | Myb80 genomic sequence - | 225 |
| | ASM465v1:4:21914917:21917416:−1 | |
| Oryza | Dwarf11 cDNA sequence - KN538714.1_FGT040 | 226 |
| longistaminata | Dwarf11 coding sequence - KN538714.1_FGT040 | 227 |
| | Dwarf11 protein sequence - KN538714.1_FGT040 | 228 |
| | Dwarf11 genomic sequence - | 229 |
| | O_longistaminata_v1.0:KN538714.1:251095:256161:−1 | |
| Oryza | Myb80 cDNA sequence - KN538714.1_FGT046 | 230 |
| longistaminata | Myb80 coding sequence - KN538714.1_FGT046 | 231 |
| | Myb80 protein sequence - KN538714.1_FGT046 | 232 |
| | Myb80 genomic sequence - | 233 |
| | O_longistaminata_v1.0:KN538714.1:278750:289881:−1 | |
| Oryza | Dwarf11 cDNA sequence - OMERI04G13440.1 | 234 |
| meridionalis | Dwarf11 coding sequence - OMERI04G13440.1 | 235 |
| | Dwarf11 protein sequence - OMERI04G13440.1 | 236 |
| | Dwarf11 genomic sequence - | 237 |
| | ryza_meridionalis_v1.3:4:18984801:18990529:−1 | |
| Oryza | Myb80 cDNA sequence - OMERI04G13500.1 | 238 |
| meridionalis | Myb80 coding sequence - OMERI04G13500.1 | 239 |
| | Myb80 protein sequence - OMERI04G13500.1 | 240 |
| | Myb80 cDNA sequence - OMERI04G13500.2 | 241 |
| | Myb80 coding sequence - OMERI04G13500.2 | 242 |
| | Myb80 protein sequence - OMERI04G13500.2 | 243 |
| | Myb80 cDNA sequence - OMERI04G13500.3 | 244 |
| | Myb80 coding sequence - OMERI04G13500.3 | 245 |
| | Myb80 protein sequence - OMERI04G13500.3 | 246 |
| | Myb80 cDNA sequence - OMERI04G13500.4 | 247 |
| | Myb80 coding sequence - OMERI04G13500.4 | 248 |
| | Myb80 protein sequence - OMERI04G13500.4 | 249 |
| | Myb80 cDNA sequence - OMERI04G13500.5 | 250 |
| | Myb80 coding sequence - OMERI04G13500.5 | 251 |
| | Myb80 protein sequence - OMERI04G13500.5 | 252 |
| | Myb80 genomic sequence - | 253 |
| | Oryza_meridionalis_v1.3:4:19037892:19050475:−1 | |
| Oryza nivara | Dwarf11 cDNA sequence - ONIVA04G13750.1 | 254 |
| | Dwarf11 coding sequence - ONIVA04G13750.1 | 255 |
| | Dwarf11 protein sequence - ONIVA04G13750.1 | 256 |
| | Dwarf11 genomic sequence - | 257 |
| | Oryza_nivara_v1.0:4:16129366:16134411:−1 | |
| Oryza nivara | Myb80 cDNA sequence - ONIVA04G13800.1 | 258 |
| | Myb80 coding sequence - ONIVA04G13800.1 | 259 |
| | Myb80 protein sequence - ONIVA04G13800.1 | 260 |
| | Myb80 genomic sequence - | 261 |
| | Oryza_nivara_v1.0:4:16169880:16172391:−1 | |
| Oryza punctata | Dwarf11 cDNA sequence - OPUNC04G13510.1 | 262 |
| | Dwarf11 coding sequence - OPUNC04G13510.1 | 263 |
| | Dwarf11 protein sequence - OPUNC04G13510.1 | 264 |
| | Dwarf11 genomic sequence - | 265 |
| | Oryza_punctata_v1.2:4:21171295:21176328:−1 | |
| Oryza punctata | Myb80 cDNA sequence - OPUNC04G13560.1 | 266 |
| | Myb80 coding sequence - OPUNC04G13560.1 | 267 |
| | Myb80 protein sequence - OPUNC04G13560.1 | 268 |
| | Myb80 genomic sequence - | 269 |
| | Oryza_punctata_v1.2:4:21205485:21207976:−1 | |
| Oryza | Dwarf11 cDNA sequence - ORUFI04G16950.1 | 270 |
| rufipogon | Dwarf11 coding sequence - ORUFI04G16950.1 | 271 |
| | Dwarf11 protein sequence - ORUFI04G16950.1 | 272 |
| | Dwarf11 genomic sequence - | 273 |
| | OR_W1943:4:19480753:19485797:−1 | |
| Oryza | Myb80 cDNA sequence - ORUFI04G17000.1 | 274 |
| rufipogon | Myb80 coding sequence - ORUFI04G17000.1 | 275 |
| | Myb80 protein sequence - ORUFI04G17000.1 | 276 |
| | Myb80 genomic sequence - | 277 |
| | OR_W1943:4:19522579:19525090:−1 | |
| Oryza sativa | Dwarf11 cDNA sequence - Os04t0469800-01 | 278 |
| | Dwarf11 coding sequence - Os04t0469800-01 | 279 |
| | Dwarf11 protein sequence - Os04t0469800-01 | 280 |
| | Dwarf11 cDNA sequence - Os04t0469800-02 | 281 |
| | Dwarf11 coding sequence - Os04t0469800-02 | 282 |
| | Dwarf11 protein sequence - Os04t0469800-02 | 283 |
| | Dwarf11 genomic sequence - IRGSP- | 284 |
| | 1.0:4:23466567:23472192:−1 | |
| Oryza sativa | Myb80 cDNA sequence - Os04t0470600-00 | 285 |
| | Myb80 coding sequence - Os04t0470600-00 | 286 |
| | Myb80 protein sequence - Os04t0470600-00 | 287 |
| | Myb80 genomic sequence - IRGSP- | 288 |
| | 1.0:4:23510635:23512134:−1 | |
| Setaria italica | Dwarf11 cDNA sequence - KQK97661 | 289 |
| | Dwarf11 coding sequence - KQK97661 | 290 |
| | Dwarf11 protein sequence - KQK97661 | 291 |
| | Dwarf11 genomic sequence - | 292 |
| | Setaria_italica_v2.0:VII:22472930:22477595:−1 | |
| Setaria italica | Myb80 cDNA sequence - KQK97666 | 293 |
| | Myb80 coding sequence - KQK97666 | 294 |
| | Myb80 protein sequence - KQK97666 | 295 |
| | Myb80 genomic sequence - | 296 |
| | Setaria_italica_v2.0:VII:22506182:22508488:−1 | |
| Sorghum | Dwarf11 cDNA sequence - EES10969 | 297 |
| bicolor | Dwarf11 coding sequence - EES10969 | 298 |
| | Dwarf11 protein sequence - EES10969 | 299 |
| | Dwarf11 genomic sequence - | 300 |
| | Sorghum_bicolor_NCBIv3:6:48244995:48250831:1 | |
| Sorghum | Myb80 cDNA sequence - EES12341 | 301 |
| bicolor | Myb80 coding sequence - EES12341 | 302 |
| | Myb80 protein sequence - EES12341 | 303 |
| | Myb80 genomic sequence - | 304 |
| | Sorghum_bicolor_NCBIv3:6:48285459:48288496:−1 | |
| Triticum | Dwarf11-A cDNA sequence - TraesCS2A02G331800.2 | 305 |
| aestivum | Dwarf11-A coding sequence - TraesCS2A02G331800.2 | 306 |
| | Dwarf11-A protein sequence - TraesCS2A02G331800.2 | 307 |
| | Dwarf11-A cDNA sequence - TraesCS2A02G331800.1 | 308 |
| | Dwarf11-A coding sequence - TraesCS2A02G331800.1 | 309 |
| | Dwarf11-A protein sequence - TraesCS2A02G331800.1 | 310 |
| | Dwarf11-A genomic sequence - | 311 |
| | IWGSC:2A:564616207:564621455:−1 | |
| Triticum | Dwarf11-B cDNA sequence - TraesCS2B02G350400.2 | 312 |
| aestivum | Dwarf11-B coding sequence - TraesCS2B02G350400.2 | 313 |
| | Dwarf11-B protein sequence - TraesCS2B02G350400.2 | 314 |
| | Dwarf11-B cDNA sequence - TraesCS2B02G350400.1 | 315 |
| | Dwarf11-B coding sequence - TraesCS2B02G350400.1 | 316 |
| | Dwarf11-B protein sequence - TraesCS2B02G350400.1 | 317 |
| | Dwarf11-B genomic sequence - | 318 |
| | IWGSC:2B:497794914:497800257:1 | |
| Triticum | Dwarf11-D cDNA sequence - TraesCS2D02G331100.1 | 319 |
| aestivum | Dwarf11-D coding sequence - TraesCS2D02G331100.1 | 320 |
| | Dwarf11-D protein sequence - TraesCS2D02G331100.1 | 321 |
| | Dwarf11-D genomic sequence - | 322 |
| | IWGSC:2D:423852701:423857987:1 | |
| Triticum | Myb80-A cDNA sequence - TraesCS2A02G331200.1 | 323 |
| aestivum | Myb80-A coding sequence - TraesCS2A02G331200.1 | 324 |
| | Myb80-A protein sequence - TraesCS2A02G331200.1 | 325 |
| | Myb80-A genomic sequence - | 326 |
| | IWGSC:2A:564217648:564220489:1 | |
| Triticum | Myb80-B cDNA sequence - TraesCS2B02G351000.1 | 327 |
| aestivum | Myb80-B coding sequence - TraesCS2B02G351000.1 | 328 |
| | Myb80-B protein sequence - TraesCS2B02G351000.1 | 329 |
| | Myb80-B genomic sequence - | 330 |
| | IWGSC:2B:498308950:498311765:−1 | |
| Triticum | Myb80-D cDNA sequence - TraesCS2D02G331700.1 | 331 |
| aestivum | Myb80-D coding sequence - TraesCS2D02G331700.1 | 332 |
| | Myb80-D protein sequence - TraesCS2D02G331700.1 | 333 |
| | Myb80-D genomic sequence - | 334 |
| | IWGSC:2D:424013456:424016258:−1 | |
| Triticum | Dwarf11-A cDNA sequence - TRIDC2AG048380.8 | 335 |
| dicoccoides | Dwarf11-A coding sequence - TRIDC2AG048380.8 | 336 |
| | Dwarf11-A protein sequence - TRIDC2AG048380.8 | 337 |
| | Dwarf11-A cDNA sequence - TRIDC2AG048380.2 | 338 |
| | Dwarf11-A coding sequence - TRIDC2AG048380.2 | 339 |
| | Dwarf11-A protein sequence - TRIDC2AG048380.2 | 340 |
| | Dwarf11-A cDNA sequence - TRIDC2AG048380.5 | 341 |
| | Dwarf11-A coding sequence - TRIDC2AG048380.5 | 342 |
| | Dwarf11-A protein sequence - TRIDC2AG048380.5 | 343 |
| | Dwarf11-A cDNA sequence - TRIDC2AG048380.6 | 344 |
| | Dwarf11-A coding sequence - TRIDC2AG048380.6 | 345 |
| | Dwarf11-A protein sequence - TRIDC2AG048380.6 | 346 |
| | Dwarf11-A cDNA sequence - TRIDC2AG048380.3 | 347 |
| | Dwarf11-A coding sequence - TRIDC2AG048380.3 | 348 |
| | Dwarf11-A protein sequence - TRIDC2AG048380.3 | 349 |
| | Dwarf11-A cDNA sequence - TRIDC2AG048380.4 | 350 |
| | Dwarf11-A coding sequence - TRIDC2AG048380.4 | 351 |
| | Dwarf11-A protein sequence - TRIDC2AG048380.4 | 352 |
| | Dwarf11-A cDNA sequence - TRIDC2AG048380.7 | 353 |
| | Dwarf11-A coding sequence - TRIDC2AG048380.7 | 354 |
| | Dwarf11-A protein sequence - TRIDC2AG048380.7 | 355 |
| | Dwarf11-A cDNA sequence - TRIDC2AG048380.1 | 356 |
| | Dwarf11-A coding sequence - TRIDC2AG048380.1 | 357 |
| | Dwarf11-A protein sequence - TRIDC2AG048380.1 | 358 |
| | Dwarf11-A genomic sequence - | 359 |
| | WEWSeq_v.1.0:2A:561794653:561799882:1 | |
| Triticum | Dwarf11-B cDNA sequence - TRIDC2BG050840.1 | 360 |
| dicoccoides | Dwarf11-B coding sequence - TRIDC2BG050840.1 | 361 |
| | Dwarf11-B protein sequence - TRIDC2BG050840.1 | 362 |
| | Dwarf11-B cDNA sequence - TRIDC2BG050840.2 | 363 |
| | Dwarf11-B coding sequence - TRIDC2BG050840.2 | 364 |
| | Dwarf11-B protein sequence - TRIDC2BG050840.2 | 365 |
| | Dwarf11-B cDNA sequence - TRIDC2BG050840.3 | 366 |
| | Dwarf11-B coding sequence - TRIDC2BG050840.3 | 367 |
| | Dwarf11-B protein sequence - TRIDC2BG050840.3 | 368 |
| | Dwarf11-B cDNA sequence - TRIDC2BG050840.4 | 369 |
| | Dwarf11-B coding sequence - TRIDC2BG050840.4 | 370 |
| | Dwarf11-B protein sequence - TRIDC2BG050840.4 | 371 |
| | Dwarf11-B genomic sequence - | 372 |
| | WEWSeq_v.1.0:2B:496937309:496942545:1 | |
| Triticum | Myb80-B cDNA sequence - TRIDC2BG050920.1 | 373 |
| dicoccoides | Myb80-B coding sequence - TRIDC2BG050920.1 | 374 |
| | Myb80-B protein sequence - TRIDC2BG050920.1 | 375 |
| | Myb80-B genomic sequence - | 376 |
| | WEWSeq_v.1.0:2B:497491088:497492336:−1 | |
| Triticum urartu | Dwarf11 cDNA sequence - TRIUR3_23488-T1 | 377 |
| | Dwarf11 coding sequence - TRIUR3_23488-T1 | 378 |
| | Dwarf11 protein sequence - TRIUR3_23488-T1 | 379 |
| | Dwarf11 genomic sequence - | 380 |
| | ASM34745v1:scaffold51589:70981:76074:1 | |
| Triticum urartu | Myb80 cDNA sequence - TRIUR3_35325-T1 | 381 |
| | Myb80 coding sequence - TRIUR3_35325-T1 | 382 |
| | Myb80 protein sequence - TRIUR3_35325-T1 | 383 |
| | Myb80 genomic sequence - | 384 |
| | ASM34745v1:scaffold23868:10710:13155:−1 | |
| Zea mays | Dwarf11 cDNA sequence - Zm00001d003349_T001 | 385 |
| | Dwarf11 coding sequence - Zm00001d003349_T001 | 386 |
| | Dwarf11 protein sequence - Zm00001d003349_T001 | 387 |
| | Dwarf11 genomic sequence - | 388 |
| | B73_RefGen_v4:2:41027815:41032513:−1 | |
| Zea mays | Myb80 cDNA sequence - Zm00001d025664_T001 | 389 |
| | Myb80 coding sequence - Zm00001d025664_T001 | 390 |
| | Myb80 protein sequence - Zm00001d025664_T001 | 391 |
| | Myb80 genomic sequence - | 392 |
| | B73_RefGen_v4:10:125369198:125372071:−1 | |

[0908] When combining mutations in both genes, plants can be obtained which are fertile in the heterozygous stage showing a normal growth phenotype. Seeds produced from these plants via selfing show in 25% of the seeds a small grain phenotype. These small grain seeds result in sterile plants. Therefore, the sterile plants necessary for hybrid seed production can be easily identified from a pool of seeds produced from selfed heterozygous plants.

[0909] The general principle of finding specific gene pairs in the genome of a plant species may be applied to get a combination of male sterility and a morphological trait in all plant species including dicot species. So the system can equally be applied to crop species where no hybrid system is even foreseeable at the moment.

### Generation of Individual Knock Out Mutants in Barley Plants

[0910] Guide RNAs (gRNAs) targeting the first exon of either the Myb80 or the Dwarf11 gene are developed. Illustrative (Cpf1) gRNAs for the Hordeum vulgare Dwarf 11 (targeting exon 1) are provided in Table 4 (in RNA T is to be replaced by U). Transgenic barley plants are produced containing the respective Cpf1 constructs. Alternatively, it is also possible to provide the Cpf1 construct in a transient way, so no stable integration occurs. This can be achieved by particle bombardment of plasmid DNA without applying selection pressure or by providing RNP's.

TABLE 4

| | | SEQ |
|---|---|---|
| | | ID |
| Identifier | gRNA sequence | NO |
| HvDWARF11-1 | tttgctcctcaaccccaaggctccgagg | 5 |
| HvDWARF11-2 | tttggatggccccttgttggtgagaccc | 6 |
| HvDWARF11-3 | tttgtggaggtgaccagggccagagcaa | 7 |
| HvDWARF11-4 | tttcttgcctcctcgcagaaggtgatgt | 8 |
| HvDWARF11-5 | tttgcattcagtgtgatagtgaagcagg | 9 |
| HvDWARF11-6 | tttcctctccgcatcccagggaccccct | 10 |
| HvDWARF11-7 | tttggcatagggggtccctgggatgcgg | 11 |
| HvDWARF11-8 | tttcctcaacgtgctcctgtcaaccgat | 12 |
| HvDWARF11-9 | tttctcctcgtcagagagttcatcggtt | 13 |
| HvDWARF11-10 | tttgtgctggactccctgctgggaggat | 14 |
| HvDWARF11-11 | tttggtagatcttatgccttgatgctcc | 15 |
| HvDWARF11-12 | tttccagccagatggaatcagatactct | 16 |
| HvDWARF11-13 | tttagtgctgttcatctgaacccctcac | 17 |
| HvDWARF11-14 | tttccatgaagtgaggggttcagatgaa | 18 |
| HvDWARF11-15 | tttcagccttgcagatgggaggtatgtc | 19 |
| HvDWARF11-16 | tttacgcccttcggcggtggcaccaggc | 20 |
| HvDWARF11-17 | tttggcaagctctgatccagggcagagc | 21 |
| HvDWARF11-18 | tttcttcctccatcaccttgtgctgaat | 22 |
| HvDWARF11-19 | tttacctgaaattcagcacaaggtgatg | 23 |
| HvDWARF11-20 | tttggcgccctgcagatggaaaatagat | 24 |
| HvDWARF11-21 | tttcgatcggcaggcctctcgggaactc | 25 |
| HvDWARF11-22 | tccggcgatcctgctcgccttgctcctg | 26 |
| HvDWARF11-23 | ttcctgcctttgctcctcaaccccaagg | 27 |
| HvDWARF11-24 | tccgaggggcagctttggatggcccctt | 28 |
| HvDWARF11-25 | tccaaagctgcccctcggagccttgggg | 29 |
| HvDWARF11-26 | ttcctcacccctcacgcttccaacacgc | 30 |
| HvDWARF11-27 | ttccaacacgctgggtagcttcctggag | 31 |
| HvDWARF11-28 | tccaacacgctgggtagcttcctggagg | 32 |
| HvDWARF11-29 | ttcctggaggatcactgctccaggtatt | 33 |
| HvDWARF11-30 | tccaggaagctacccagcgtgttggaag | 34 |
| HvDWARF11-31 | ttcaagtcccatctgttctgcaccccca | 35 |
| HvDWARF11-32 | tcccatctgttctgcacccccaccgtgg | 36 |
| HvDWARF11-33 | ttcagctcctggtcacaggacaccacgg | 37 |
| HvDWARF11-34 | ttcatcctgcagaatgaggagaggctgt | 38 |
| HvDWARF11-35 | ttccagtgcagctaccccaggccaattc | 39 |
| HvDWARF11-36 | tccagtgcagctaccccaggccaattca | 40 |
| HvDWARF11-37 | ttcatggcatactgggcaagtcctccat | 41 |
| HvDWARF11-38 | tccatgctggtggtcctgggggaggacc | 42 |
| HvDWARF11-39 | tcccccaggaccaccagcatggaggact | 43 |
| HvDWARF11-40 | ttcctgagcctcttgtggtcctccccca | 44 |
| HvDWARF11-41 | tccacaaagctcaagccaagctaccttg | 45 |
| HvDWARF11-42 | tccaactatatgcagcgcaatcctctca | 46 |
| HvDWARF11-43 | ttcagtgtgatagtgaagcaggtgctgg | 47 |
| HvDWARF11-44 | ttcactatcacactgaatgcaaactgcg | 48 |
| HvDWARF11-45 | tccagtatcatggcagtgactggctcct | 49 |
| HvDWARF11-46 | ttcctcaccttcatgaagggcctcatct | 50 |
| HvDWARF11-47 | ttcatgaagggcctcatctcttttcctc | 51 |
| HvDWARF11-48 | ttcatgaaggtgaggaagtcctccagta | 52 |
| HvDWARF11-49 | ttcctcaccttcatgaagggcctcatct | 53 |
| HvDWARF11-50 | ttcatgaagggcctcatctcttttcctc | 54 |
| HvDWARF11-51 | ttcatgaaggtgaggaagtcctccagta | 55 |
| HvDWARF11-52 | ttcctctccgcatcccagggacccccta | 56 |
| HvDWARF11-53 | tcccagggaccccctatgccaaagctgt | 57 |
| HvDWARF11-54 | tccctgggatgcggagaggaaaagagat | 58 |
| HvDWARF11-55 | ttcacagtgcttgatatcctctctctgg | 59 |
| HvDWARF11-56 | ttcctcctctcctcaataatgcccttca | 60 |
| HvDWARF11-57 | tccctcttgcagcagtcagccttcctcc | 61 |
| HvDWARF11-58 | ttcctcaacgtgctcctgtcaaccgatg | 62 |
| HvDWARF11-59 | ttcatcggttgacaggagcacgttgagg | 63 |
| HvDWARF11-60 | tccagcacaaaactcactttctcctcgt | 64 |
| HvDWARF11-61 | tccctgctgggaggatatgagaccacct | 65 |
| HvDWARF11-62 | tcccagcagggagtccagcacaaaactc | 66 |
| HvDWARF11-63 | tccatggtcgtctacttccttgggcagt | 67 |
| HvDWARF11-64 | ttccttgggcagtcagctcaagatctgg | 68 |
| HvDWARF11-65 | tccagatcttgagctgactgcccaagga | 69 |
| HvDWARF11-66 | ttcactaggtccagatcttgagctgact | 70 |
| HvDWARF11-67 | ttcgctttggtagatcttatgccttgat | 71 |
| HvDWARF11-68 | tccatcttcttgtagtcctcagagctca | 72 |
| HvDWARF11-69 | ttccatcttcttgtagtcctcagagctc | 73 |
| HvDWARF11-70 | ttccatctggctggaaagtcctacctgt | 74 |
| HvDWARF11-71 | tccatctggctggaaagtcctacctgtt | 75 |
| HvDWARF11-72 | tccagccagatggaatcagatactctgc | 76 |
| HvDWARF11-73 | ttccagccagatggaatcagatactctg | 77 |
| HvDWARF11-74 | ttcatctgaacccctcacttcatggaaa | 78 |
| HvDWARF11-75 | ttcagatgaacagcactaaaaacaggta | 79 |
| HvDWARF11-76 | ttcatggaaatgcccaacagtttcagcc | 80 |
| HvDWARF11-77 | tccatgaagtgaggggttcagatgaaca | 81 |
| HvDWARF11-78 | ttcagccttgcagatgggaggtatgtcc | 82 |
| HvDWARF11-79 | tcccatctgcaaggctgaaactgttggg | 83 |
| HvDWARF11-80 | ttcggcggtggcaccaggctctgccctg | 84 |
| HvDWARF11-81 | tccagggcagagcctggtgccaccgccg | 85 |
| HvDWARF11-82 | ttcctccatcaccttgtgctgaatttca | 86 |
| HvDWARF11-83 | tccatcaccttgtgctgaatttcaggta | 87 |
| HvDWARF11-84 | ttcagcacaaggtgatggaggaagaaag | 88 |
| HvDWARF11-85 | ttccaatggcatacccgtacgtggagtt | 89 |
| HvDWARF11-86 | tccaatggcatacccgtacgtggagttc | 90 |
| HvDWARF11-87 | tccacgtacgggtatgccattggaatgt | 91 |
| HvDWARF11-88 | ttcccgagaggcctgccgatcgaaatcg | 92 |
| HvDWARF11-89 | tcccgagaggcctgccgatcgaaatcga | 93 |
| HvDWARF11-90 | ttcgatcggcaggcctctcgggaactcc | 94 |
| HvDWARF11-91 | ttcagagcaaattggctcgatttcgatc | 95 |
| HvMyb80-1 | TTTCCTGCAATGCCGGCCTGCCCCCCTc | 96 |
| HvMyb80-2 | TTTGGATCCGATTGCGTACTCTGGGACt | 97 |
| HvMyb80-3 | TTCACGTTGTCCTTCTCGCAGCAAGGGa | 98 |
| HvMyb80-4 | TTCCTCGGGCGTCCACTGCCCGCGCTTC | 99 |
| HvMyb80-5 | TTCCCGCAGCGCTGCAGCCCGGCGTTCt | 100 |
| HvMyb80-6 | TTCACTGACGCCGAGGAGCAGACCATCa | 101 |
| HvMyb80-7 | TTCCAGTGGTTCTTGACGTCGTTGTCCg | 102 |
| HvMyb80-8 | TTCAAGGACGAGATGCTCCACCTCCTCa | 103 |
| HvMyb80-9 | TTCCCCTCGCCCGCCATGCCCGACATGg | 104 |
| HvMyb80-10 | TTCGCCGCGCCGCCACAAGCCGACGACa | 105 |
| HvMyb80-11 | TTCAACCCGGCGCAGGCGACGGAGTTCc | 106 |
| HvMyb80-12 | TTCCGGTACGAAGGGACGGCGTCGGGGt | 107 |
| HvMyb80-13 | TTCGTACCGGAACTCCGTCGCCTGCGCc | 108 |
| HvMyb80-14 | TTCCTGCAATGCCGGCCTGCCCCCCTCg | 109 |
| HvMyb80-15 | TTTCCTGCAATGCCGGCCTGCCCCCCTc | 110 |
| HvMyb80-16 | TTCCGCCTCATCGTCGCCGCGGCTGCTg | 111 |
| HvMyb80-17 | TTCCCTCCATCCTTGCCGTCTTCCGCCt | 112 |
| HvMyb80-18 | TTCCCTTCCCTCCATCCTTGCCGTCTTC | 113 |
| HvMyb80-19 | TTCGTGAGCTCGTCGGGCAAGTCCCAGa | 114 |

[0911] Plants containing the mutations resulting in the generation of early stop codons TGA, TAA, or TAG) in the ORF are identified based on appropriate molecular technologies (PCR and sequencing). Seeds from the TO-plants are produced. The T1 plants are checked again for the presence of the mutations. Plants containing homozygous mutations in the Myb80 or the Dwarf11 gene are identified. The phenotype of the homozygous plants is determined:

[0912] Myb80 homozygous mutant plants show a male sterile phenotype but are not affected in the female fertility and are thus female fertile.

[0913] Dwarf11 homozygous mutant plants show a reduced plant height of 10% compared to wt plants and the seeds produced on these plants have a different shape (>10% reduced length) and a reduced weight (the thousand kernel weight is reduced by 10%) compared to either the heterozygous plants or the wt-plants. This difference in the seed shape and the seed weight allows the separation of the seeds harbouring a homozygous mutation of the Dwarf11 gene in a seed processing machine.

[0914] In co-transformation experiments using both constructs together, TO-plants are identified showing mutations in the first exon of both genes together.

[0915] Plants showing mutations resulting in early stop codons in both genes are identified and T1-seeds are produced form these plants.

[0916] T1 plants are checked via appropriate molecular methods for the presence of the expected mutations. Plants homozygous for both mutations are identified and the phenotype of these plants is determined. The plants are smaller than wt plants and are not producing pollen.

[0917] Seeds from heterozygous plants produced via selfing are separated based on their seed size. The small sized seeds and the large seeds will be grown separately: The small sized seeds result in dwarf, males sterile plants whereas the larger seeds give normal plants, fully fertile.

### Test of Hybridization

[0918] Small sized seeds (male sterile, dwarf) are grown in the field in one row. There is a neighbouring row at each side of the male sterile row in close distance with any barley variety having a similar flowering time. Seeds from each row are harvested separately. The seeds from the middle row are 100% hybrid seeds whereas the seeds from the pollinator lanes are 100% self-pollinated seeds

### Test of Hybrid Vigor

[0919] Hybrid seeds deriving from the Test Hybridization is grown in a field trial to compare the yield between the hybrid lines and the parent lines. The yield from the hybrid lines is at least 110% of the yield of the parental lines.

### Screening of a TILLING Population

[0920] Mutants based on EMS TILLING are generated and lines with a double mutation are identified. The TILLING experiment is conducted in accordance with the following procedures. Dry seeds are initially soaked in tap water for 10 h until germinated and embryo buds begin to emerge out of the seed coat. The germinated seeds are then incubated in 0.5, 1.0, or 1.5% EMS in 0.1 M sodium phosphate buffer (pH 7.0) for 4 h. Around 2000 seeds are used in each treatment. EMS treatment is performed on a shaker at 50 rpm in dark conditions at 20 C with one seed per milliliter EMS buffer. After incubation, seeds are washed in tap water for 4 h at room temperature and prepared for sowing. (Guo et al., 2017). Repeat all the experiments done with the GE-derived plants also with the TILLING derived plants.

1. A method for generating or modifying a plant or plant part, comprising
a) providing a plant or plant part not expressing or having reduced expression, activity, and/or stability of the Myb80 gene product; and/or having a mutation in the Myb80 gene;
b) reducing or eliminating expression, activity, and/or stability of the Dwarf11 gene product in said plant or plant part; and/or introducing a mutation in the Dwarf11 gene or regulatory sequence thereof.

2. The method according to claim 1, wherein said plant or plant part comprises one or more mutation in the Myb80 gene, preferably wherein said mutation is selected from a nonsense or missense mutation, a frameshift mutation, an indel mutation, a dominant negative mutation, a knock-out mutation, or knock-down mutation.

3. A method for generating or modifying a plant or plant part, comprising
a) providing a plant or plant part not expressing or having reduced expression, activity, and/or stability of the Dwarf11 gene product; and/or having a mutation in the Dwarf11 gene;
b) reducing or eliminating expression, activity, and/or stability of the Myb80 gene product in said plant or plant part; and/or introducing a mutation in the Myb80 gene or regulatory sequence thereof.

4. The method according to claim 3, wherein said plant or plant part comprises one or more mutation in the Dwarf11 gene, preferably wherein said mutation is selected from a nonsense or missense mutation, a frameshift mutation, an indel mutation, a dominant negative mutation, a knock-out mutation, or knock-down mutation.

5. The method according to any of claim 1, wherein said MYB80 gene and said DWARF11 gene are located on the same chromosome, preferably wherein the physical distance between said Myb80 gene and said Dwarf11 gene in the genome of said plant or plant part is at most 1 Mbp.

6. A method for identifying or selecting a plant or plant part, comprising
a) providing a mixture of plants or plant parts resulting from a cross between a first plant and a second plant; wherein said first plant and/or said second plant have a heterozygous or homozygous mutation in the Myb80 gene and the Dwarf11 gene on the same chromosome;
b) selecting a plant or plant part comprising a homozygous mutation in the Dwarf11 gene.

7. The method according to claim 6, wherein selecting a plant or plant part comprising a homozygous mutation in the Dwarf11 gene comprises phenotypic selection.

8. The method according to claim 7, wherein said phenotypic selection comprises selection based on plant height, plant grain size, grain shape, or grain weight.

9. The method according to claim 1, wherein said method is a method for generating or modifying, or for selecting a plant or plant part which is male sterile.

10. A plant or plant part generated, modified, identified, or selected according to the method of claim 1, or offspring thereof.

11. The plant or plant part according to claim 10, comprising a mutation in the Myb80 gene and the Dwarf11 gene.

12. A method for generating hybrid plants or plant parts comprising crossing a first plant having a homozygous mutation in Myb80 and in Dwarf11 with a second plant, and harvesting seeds, and optionally sowing said seeds.

13. A method for developing an assay to phenotypically detect a gene or an allele of a gene of interest in a plant or plant part, comprising screening for the presence of genes located at most 1 Mb up- or downstream in the chromosome comprising said gene of interest, and selecting a gene causing or capable of causing a phenotype or an allele-dependent phenotype in a plant or plant part as a proxy for phenotypically detecting said gene of interest.

14. The method or plant according to claim 1, wherein said plant or plant part is from the family of Poaceae.

15. A polynucleotide having, comprising, consisting of, consisting essentially of, or comprised in or encoding a sequence which is at least 80%, at least 85%, at least 90%, at least 95%, at least 96%, at least 97%, at least 98%, or at least 99% identical to a sequence as set forth in any of SEQ ID NOs: 1-392, a unique fragment thereof, or the complement or reverse complement thereof.

The application's sequence listing, which the Patent Office published only in electronic form, follows.

SEQUENCE LISTING (392 sequences)

SEQ ID NO: 1 - DNA, 1127 bp, synthetic construct
  misc_feature 1..1127: note = Oryza sativa
  source 1..1127: mol_type = other DNA
atggggcgggtgccgtgctgcgagaaggacaacgtgaagcgcgggcagtggacgcccgaggaggacaacaagctgctctcctacatcacccagtacggcacccgcaactggcgcctcatccccaagaacgccgggttgcagcggtgcgggaagagctgccggctgcggtggaccaactacctccggcccgacctcaagcacggcgagttcaccgacgccgaggagcagaccatcatcaagctccactccgtcgtcggcaacaggtggtcggtgatcgcggcgcagcttccggggcggacggacaacgacgtgaagaaccactggaacacgaagctgaagaagaagctgtccgggatgggcatcgaccccgtcacgcacaagtccttctcgcacctcatggccgagatcgccaccacgctggcgccgccgcaggtggcgcacctcgccgaggccgcgctggggtgcttcaaggacgagatgctccacctcctcaccaagaagcgcccctccgacttcccctcgcccgccgtgcacgacggcgccggcgccggcgccagcgcgtccgcgctcgccgcgccctgtttccccgccgcgccgccgcaccacccgcaggccgacgacaccatcgagcgcatcaagctcggcctgtcccgcgccatcatgagcgatccctccaccgcctccgccgccgccgccgccgccgcgccctccgcccccgcggaggacaagccgtggccgcccggcgacatgtccgaggggctcgccgggatgtacgccacgtacaacccggcggcgcacgcgcacgcgcaggcccaggccgagttccggtacgacggggcctccgcggcgcagggctacgtcctcggcggcgacggcgaccagggcacgtcgatgtggagccaccagagcctgtacagcgggagctccggcaccgaggaggccaggcgggagttgccggagaagggcaacgacagcgtcggcagcagcggcggcgacgacgacgccgcggacgacggcaaggacagcgggaagggggcagcctccgacatgtcgggcctgttcgcctccgactgcgtgctctgggacttgcccgacgagctcacgaatcacatggtgtagryasatva

SEQ ID NO: 2 - DNA, 1626 bp, synthetic construct
  misc_feature 1..1626: note = Oryza sativa
  source 1..1626: mol_type = other DNA
atttataacacgcggcgcggccgtgtgagcgccgcacgcacgcagcagcagcggaatctcgacggcggcgacatcatggggcgggtgccgtgctgcgagaaggacaacgtgaagcgcgggcagtggacgcccgaggaggacaacaagctgctctcctacatcacccagtacggcacccgcaactggcgcctcatccccaagaacgccggtacgttggcgcgcgcgccgccaccggcgaacgcgtggttgcagcagcggcggcgctctgaccggggtgtttgttgctggaacgttggcagggttgcagcggtgcgggaagagctgccggctgcggtggaccaactacctccggcccgacctcaagcacggcgagttcaccgacgccgaggagcagaccatcatcaagctccactccgtcgtcggcaacaggtaggcatcaacgagtggtctcgctacaccgtcttgtgatcttgggtcatttttggaggaatgtattgagcaatgcgggatggggctgtgtgtggcaaggtggtcggtgatcgcggcgcagcttccggggcggacggacaacgacgtgaagaaccactggaacacgaagctgaagaagaagctgtccgggatgggcatcgaccccgtcacgcacaagtccttctcgcacctcatggccgagatcgccaccacgctggcgccgccgcaggtggcgcacctcgccgaggccgcgctggggtgcttcaaggacgagatgctccacctcctcaccaagaagcgcccctccgacttcccctcgcccgccgtgcacgacggcgccggcgccggcgccagcgcgtccgcgctcgccgcgccctgtttccccgccgcgccgccgcaccacccgcaggccgacgacaccatcgagcgcatcaagctcggcctgtcccgcgccatcatgagcgatccctccaccgcctccgccgccgccgccgccgccgcgccctccgcccccgcggaggacaagccgtggccgcccggcgacatgtccgaggggctcgccgggatgtacgccacgtacaacccggcggcgcacgcgcacgcgcaggcccaggccgagttccggtacgacggggcctccgcggcgcagggctacgtcctcggcggcgacggcgaccagggcacgtcgatgtggagccaccagagcctgtacagcgggagctccggcaccgaggaggccaggcgggagttgccggagaagggcaacgacagcgtcggcagcagcggcggcgacgacgacgccgcggacgacggcaaggacagcgggaagggggcagcctccgacatgtcgggcctgttcgcctccgactgcgtgctctgggacttgcccgacgagctcacgaatcacatggtgtagctaagctataaaacgcgggaaaacttagcacggcgaagcacgccatgatccacatcacttgcagttgcaggtggtgagaattggatagagcgaaaaattgctaccaataatattgctgaaagagtgacagaaaaagtgaaaaactatagtatgtagctggcaagaaaaatggggattctttttgcttggaaaagagaaaaaaaagtgagatgtgaatagttttaccgagaagcaryasatva

SEQ ID NO: 3 - DNA, 1551 bp, synthetic construct
  misc_feature 1..1551: note = Triticum aestivum
  source 1..1551: mol_type = other DNA
caagcgccgcacgccgatcgaaaactcagtcgctcgaacactcacccagcaagaacgcagcgccagcgacgtatcggcctaccggaaagcggagcctccacgacggatcccgtgcgcgcgcagggcggtccgggaggcggaggcgccgacatgggccggatcccgtgctgcgagaaggacaacgtgaagcgcgggcagtggacgcccgaggaggacaacaagctgctctcctacatcacgcagcacggcacgcgcaactggcgcctcatccccaagaacgccgggctgcagcgatgcgggaagagctgccggctgcggtggaccaactacctgcggcccgacctcaagcacggcgagttcactgacgccgaggagcagaccatcatcaagctgcactccgtcgtcggcaacaggtggtcggtgatcgcggcccagctgccggggcggacggacaacgacgtcaagaaccactggaacaccaagctcaagaagaagctgtccgggatgggcatcgaccccgtcacgcacaagtccttctcgcacctcatggccgagatcgccaccacgctcgccccgccgcaggtggcgcacctcgccgaggccgccctggggtgcttcaaggacgagatgctccacctcctcaccaagaagcgccccaccgacttcccctcgcccgccatgcccgacacggcggcgggcgccagcgcgggcatggccatgggcccgggcgcgcacatcgcgccctgctacgccgcgccgccacaagccgacgacaccatcgagcgcatcaagatgggcctgtcccgcgccatcatgagcgagcccgccgctcccgcggccgacaagccgtggccatcgggcgacatgtccgaggggctggccggcatgtacgccgcgttcaaccccgcgcaggcgacggagttccggtacgaagggacggcgtcggggtacgtccttgggggcgacggcgaccagggcacgtcgatgtggagccaccacagcatgtacagcgggagctccggcaccgaggggggcaggccggcattgcaggaaaagggcaacgacagtgtcggcagcagcggcggcgacgaggaggcggaagacggcaaggagggagggaagggagcctccgacatgtcggggctgtttggatccgattgcgtactctgggacttgcccgacgagctgacgaatcacatgtgtgactaaattcacacggcgagcttagctagcatcatcgatgaacgtcagttcgccggagaaaagaaagcctagagccaaacgattttagaagcacataaatttctgacagtgcctgagaagagctagaataaacagggaaactggaaaatggcgtcccttcttcttttttttctgcgtgcagaactgttaagtgtacattgctctgccgctggccatgctattttttgggggtcctgtctactgtgcttcagtcaaaacgacttcaattcaaacagatttggtagcatgtcaatgaagctgtctgaccgtaacatgtcaatgttttagtaaaaccgcactrtcmastvm

SEQ ID NO: 4 - DNA, 1049 bp, synthetic construct
  misc_feature 1..1049: note = Oryza sativa
  source 1..1049: mol_type = other DNA
atggtgggaggagagcttgtgctggctgctctggtgatcctgcttgctttgctgctgaccctggtgctgagccacttcctgcctttgctcctgaatcccaaggctcccaagggaagctttgggtggcctctccttggtgagacgctgaggttcctcagtcctcatgctagcaacaccctgggcagcttcctggaggatcactgctccaggtatgggagggtgtttaagtcccatctgttctgcacccccaccatagtgtcctgtgaccaggagctgaaccacttcatccttcagaatgaggagaggctgtttcagtgcagctaccccaggccaattcatggcattctgggcaagtcctccatgttagtggtcctaggggaggaccacaagaggctcaggaaccttgctctagcactggtcacctccacaaagctcaagcccagctaccttggcgacattgagaagattgcactgcatatagttgggtcatggcatggcaagagcaaggacaaggggatggtcaatgtcatcgccttctgcgaggaggcaagaaagtttgcattcagtgtaatagtgaagcaggtgctggggctatcaccagaggagccggtcactgccatgatacttgaagatttcctcgccttcatgaagggtctcatctctttccctctctacatcccagggacgccctatgccaaagctgtgcaggccagagcgaggatatcaagcactgtgaagggtattattgaggagaggaggaatgctggctccagcaacaagggtgatttccttgatgtgctgctttcaagcaatgagctctctgatgaggagaaagtgagctttgtgctggattccttactgggaggatatgagaccacctcactcttgatctccatggttgtgtatttccttgggcagtcagctcaagatctggaactagtgaagagggagcatgaaggcataagatcgaagaaagagaaggacgagttcttgagctctgaagactataagaagatggaatatacccaacatgtaagatgaryasatva

SEQ ID NO: 5 - DNA, 28 bp, synthetic construct
  misc_feature 1..28: note = HvDWARF11-1
  source 1..28: mol_type = other DNA
tttgctcctcaaccccaaggctccgagg

SEQ ID NO: 6 - DNA, 28 bp, synthetic construct
  misc_feature 1..28: note = HvDWARF11-2
  source 1..28: mol_type = other DNA
tttggatggccccttgttggtgagaccc

SEQ ID NO: 7 - DNA, 28 bp, synthetic construct
  misc_feature 1..28: note = HvDWARF11-3
  source 1..28: mol_type = other DNA
tttgtggaggtgaccagggccagagcaa

SEQ ID NO: 8 - DNA, 28 bp, synthetic construct
  misc_feature 1..28: note = HvDWARF11-4
  source 1..28: mol_type = other DNA
tttcttgcctcctcgcagaaggtgatgt

SEQ ID NO: 9 - DNA, 28 bp, synthetic construct
  misc_feature 1..28: note = HvDWARF11-5
  source 1..28: mol_type = other DNA
tttgcattcagtgtgatagtgaagcagg

SEQ ID NO: 10 - DNA, 28 bp, synthetic construct
  misc_feature 1..28: note = HvDWARF11-6
  source 1..28: mol_type = other DNA
tttcctctccgcatcccagggaccccct

SEQ ID NO: 11 - DNA, 28 bp, synthetic construct
  misc_feature 1..28: note = HvDWARF11-7
  source 1..28: mol_type = other DNA
tttggcatagggggtccctgggatgcgg

SEQ ID NO: 12 - DNA, 28 bp, synthetic construct
  misc_feature 1..28: note = HvDWARF11-8
  source 1..28: mol_type = other DNA
tttcctcaacgtgctcctgtcaaccgat

SEQ ID NO: 13 - DNA, 28 bp, synthetic construct
  misc_feature 1..28: note = HvDWARF11-9
  source 1..28: mol_type = other DNA
tttctcctcgtcagagagttcatcggtt

SEQ ID NO: 14 - DNA, 28 bp, synthetic construct
  misc_feature 1..28: note = HvDWARF11-10
  source 1..28: mol_type = other DNA
tttgtgctggactccctgctgggaggat

SEQ ID NO: 15 - DNA, 28 bp, synthetic construct
  misc_feature 1..28: note = HvDWARF11-11
  source 1..28: mol_type = other DNA
tttggtagatcttatgccttgatgctcc

SEQ ID NO: 16 - DNA, 28 bp, synthetic construct
  misc_feature 1..28: note = HvDWARF11-12
  source 1..28: mol_type = other DNA
tttccagccagatggaatcagatactct

SEQ ID NO: 17 - DNA, 28 bp, synthetic construct
  misc_feature 1..28: note = HvDWARF11-13
  source 1..28: mol_type = other DNA
tttagtgctgttcatctgaacccctcac

SEQ ID NO: 18 - DNA, 28 bp, synthetic construct
  misc_feature 1..28: note = HvDWARF11-14
  source 1..28: mol_type = other DNA
tttccatgaagtgaggggttcagatgaa

SEQ ID NO: 19 - DNA, 28 bp, synthetic construct
  misc_feature 1..28: note = HvDWARF11-15
  source 1..28: mol_type = other DNA
tttcagccttgcagatgggaggtatgtc

SEQ ID NO: 20 - DNA, 28 bp, synthetic construct
  misc_feature 1..28: note = HvDWARF11-16
  source 1..28: mol_type = other DNA
tttacgcccttcggcggtggcaccaggc

SEQ ID NO: 21 - DNA, 28 bp, synthetic construct
  misc_feature 1..28: note = HvDWARF11-17
  source 1..28: mol_type = other DNA
tttggcaagctctgatccagggcagagc

SEQ ID NO: 22 - DNA, 28 bp, synthetic construct
  misc_feature 1..28: note = HvDWARF11-18
  source 1..28: mol_type = other DNA
tttcttcctccatcaccttgtgctgaat

SEQ ID NO: 23 - DNA, 28 bp, synthetic construct
  misc_feature 1..28: note = HvDWARF11-19
  source 1..28: mol_type = other DNA
tttacctgaaattcagcacaaggtgatg

SEQ ID NO: 24 - DNA, 28 bp, synthetic construct
  misc_feature 1..28: note = HvDWARF11-20
  source 1..28: mol_type = other DNA
tttggcgccctgcagatggaaaatagat

SEQ ID NO: 25 - DNA, 28 bp, synthetic construct
  misc_feature 1..28: note = HvDWARF11-21
  source 1..28: mol_type = other DNA
tttcgatcggcaggcctctcgggaactc

SEQ ID NO: 26 - DNA, 28 bp, synthetic construct
  misc_feature 1..28: note = HvDWARF11-22
  source 1..28: mol_type = other DNA
tccggcgatcctgctcgccttgctcctg

SEQ ID NO: 27 - DNA, 28 bp, synthetic construct
  misc_feature 1..28: note = HvDWARF11-23
  source 1..28: mol_type = other DNA
ttcctgcctttgctcctcaaccccaagg

SEQ ID NO: 28 - DNA, 28 bp, synthetic construct
  misc_feature 1..28: note = HvDWARF11-24
  source 1..28: mol_type = other DNA
tccgaggggcagctttggatggcccctt

SEQ ID NO: 29 - DNA, 28 bp, synthetic construct
  misc_feature 1..28: note = HvDWARF11-25
  source 1..28: mol_type = other DNA
tccaaagctgcccctcggagccttgggg

SEQ ID NO: 30 - DNA, 28 bp, synthetic construct
  misc_feature 1..28: note = HvDWARF11-26
  source 1..28: mol_type = other DNA
ttcctcacccctcacgcttccaacacgc

SEQ ID NO: 31 - DNA, 28 bp, synthetic construct
  misc_feature 1..28: note = HvDWARF11-27
  source 1..28: mol_type = other DNA
ttccaacacgctgggtagcttcctggag

SEQ ID NO: 32 - DNA, 28 bp, synthetic construct
  misc_feature 1..28: note = HvDWARF11-28
  source 1..28: mol_type = other DNA
tccaacacgctgggtagcttcctggagg

SEQ ID NO: 33 - DNA, 28 bp, synthetic construct
  misc_feature 1..28: note = HvDWARF11-29
  source 1..28: mol_type = other DNA
ttcctggaggatcactgctccaggtatt

SEQ ID NO: 34 - DNA, 28 bp, synthetic construct
  misc_feature 1..28: note = HvDWARF11-30
  source 1..28: mol_type = other DNA
tccaggaagctacccagcgtgttggaag

SEQ ID NO: 35 - DNA, 28 bp, synthetic construct
  misc_feature 1..28: note = HvDWARF11-31
  source 1..28: mol_type = other DNA
ttcaagtcccatctgttctgcaccccca

SEQ ID NO: 36 - DNA, 28 bp, synthetic construct
  misc_feature 1..28: note = HvDWARF11-32
  source 1..28: mol_type = other DNA
tcccatctgttctgcacccccaccgtgg

SEQ ID NO: 37 - DNA, 28 bp, synthetic construct
  misc_feature 1..28: note = HvDWARF11-33
  source 1..28: mol_type = other DNA
ttcagctcctggtcacaggacaccacgg

SEQ ID NO: 38 - DNA, 28 bp, synthetic construct
  misc_feature 1..28: note = HvDWARF11-34
  source 1..28: mol_type = other DNA
ttcatcctgcagaatgaggagaggctgt

SEQ ID NO: 39 - DNA, 28 bp, synthetic construct
  misc_feature 1..28: note = HvDWARF11-35
  source 1..28: mol_type = other DNA
ttccagtgcagctaccccaggccaattc

SEQ ID NO: 40 - DNA, 28 bp, synthetic construct
  misc_feature 1..28: note = HvDWARF11-36
  source 1..28: mol_type = other DNA
tccagtgcagctaccccaggccaattca

SEQ ID NO: 41 - DNA, 28 bp, synthetic construct
  misc_feature 1..28: note = HvDWARF11-37
  source 1..28: mol_type = other DNA
ttcatggcatactgggcaagtcctccat

SEQ ID NO: 42 - DNA, 28 bp, synthetic construct
  misc_feature 1..28: note = HvDWARF11-38
  source 1..28: mol_type = other DNA
tccatgctggtggtcctgggggaggacc

SEQ ID NO: 43 - DNA, 28 bp, synthetic construct
  misc_feature 1..28: note = HvDWARF11-39
  source 1..28: mol_type = other DNA
tcccccaggaccaccagcatggaggact

SEQ ID NO: 44 - DNA, 28 bp, synthetic construct
  misc_feature 1..28: note = HvDWARF11-40
  source 1..28: mol_type = other DNA
ttcctgagcctcttgtggtcctccccca

SEQ ID NO: 45 - DNA, 28 bp, synthetic construct
  misc_feature 1..28: note = HvDWARF11-41
  source 1..28: mol_type = other DNA
tccacaaagctcaagccaagctaccttg

SEQ ID NO: 46 - DNA, 28 bp, synthetic construct
  misc_feature 1..28: note = HvDWARF11-42
  source 1..28: mol_type = other DNA
tccaactatatgcagcgcaatcctctca

SEQ ID NO: 47 - DNA, 28 bp, synthetic construct
  misc_feature 1..28: note = HvDWARF11-43
  source 1..28: mol_type = other DNA
ttcagtgtgatagtgaagcaggtgctgg

SEQ ID NO: 48 - DNA, 28 bp, synthetic construct
  misc_feature 1..28: note = HvDWARF11-44
  source 1..28: mol_type = other DNA
ttcactatcacactgaatgcaaactgcg

SEQ ID NO: 49 - DNA, 28 bp, synthetic construct
  misc_feature 1..28: note = HvDWARF11-45
  source 1..28: mol_type = other DNA
tccagtatcatggcagtgactggctcct

SEQ ID NO: 50 - DNA, 28 bp, synthetic construct
  misc_feature 1..28: note = HvDWARF11-46
  source 1..28: mol_type = other DNA
ttcctcaccttcatgaagggcctcatct

SEQ ID NO: 51 - DNA, 28 bp, synthetic construct
  misc_feature 1..28: note = HvDWARF11-47
  source 1..28: mol_type = other DNA
ttcatgaagggcctcatctcttttcctc

SEQ ID NO: 52 - DNA, 28 bp, synthetic construct
  misc_feature 1..28: note = HvDWARF11-48
  source 1..28: mol_type = other DNA
ttcatgaaggtgaggaagtcctccagta

SEQ ID NO: 53 - DNA, 28 bp, synthetic construct
  misc_feature 1..28: note = HvDWARF11-49
  source 1..28: mol_type = other DNA
ttcctcaccttcatgaagggcctcatct

SEQ ID NO: 54 - DNA, 28 bp, synthetic construct
  misc_feature 1..28: note = HvDWARF11-50
  source 1..28: mol_type = other DNA
ttcatgaagggcctcatctcttttcctc

SEQ ID NO: 55 - DNA, 28 bp, synthetic construct
  misc_feature 1..28: note = HvDWARF11-51
  source 1..28: mol_type = other DNA
ttcatgaaggtgaggaagtcctccagta

SEQ ID NO: 56 - DNA, 28 bp, synthetic construct
  misc_feature 1..28: note = HvDWARF11-52
  source 1..28: mol_type = other DNA
ttcctctccgcatcccagggacccccta

SEQ ID NO: 57 - DNA, 28 bp, synthetic construct
  misc_feature 1..28: note = HvDWARF11-53
  source 1..28: mol_type = other DNA
tcccagggaccccctatgccaaagctgt

SEQ ID NO: 58 - DNA, 28 bp, synthetic construct
  misc_feature 1..28: note = HvDWARF11-54
  source 1..28: mol_type = other DNA
tccctgggatgcggagaggaaaagagat

SEQ ID NO: 59 - DNA, 28 bp, synthetic construct
  misc_feature 1..28: note = HvDWARF11-55
  source 1..28: mol_type = other DNA
ttcacagtgcttgatatcctctctctgg

SEQ ID NO: 60 - DNA, 28 bp, synthetic construct
  misc_feature 1..28: note = HvDWARF11-56
  source 1..28: mol_type = other DNA
ttcctcctctcctcaataatgcccttca

SEQ ID NO: 61 - DNA, 28 bp, synthetic construct
  misc_feature 1..28: note = HvDWARF11-57
  source 1..28: mol_type = other DNA
tccctcttgcagcagtcagccttcctcc

SEQ ID NO: 62 - DNA, 28 bp, synthetic construct
  misc_feature 1..28: note = HvDWARF11-58
  source 1..28: mol_type = other DNA
ttcctcaacgtgctcctgtcaaccgatg

SEQ ID NO: 63 - DNA, 28 bp, synthetic construct
  misc_feature 1..28: note = HvDWARF11-59
  source 1..28: mol_type = other DNA
ttcatcggttgacaggagcacgttgagg

SEQ ID NO: 64 - DNA, 28 bp, synthetic construct
  misc_feature 1..28: note = HvDWARF11-60
  source 1..28: mol_type = other DNA
tccagcacaaaactcactttctcctcgt

SEQ ID NO: 65 - DNA, 28 bp, synthetic construct
  misc_feature 1..28: note = HvDWARF11-61
  source 1..28: mol_type = other DNA
tccctgctgggaggatatgagaccacct

SEQ ID NO: 66 - DNA, 28 bp, synthetic construct
  misc_feature 1..28: note = HvDWARF11-62
  source 1..28: mol_type = other DNA
tcccagcagggagtccagcacaaaactc

SEQ ID NO: 67 - DNA, 28 bp, synthetic construct
  misc_feature 1..28: note = HvDWARF11-63
  source 1..28: mol_type = other DNA
tccatggtcgtctacttccttgggcagt

SEQ ID NO: 68 - DNA, 28 bp, synthetic construct
  misc_feature 1..28: note = HvDWARF11-64
  source 1..28: mol_type = other DNA
ttccttgggcagtcagctcaagatctgg

SEQ ID NO: 69 - DNA, 28 bp, synthetic construct
  misc_feature 1..28: note = HvDWARF11-65
  source 1..28: mol_type = other DNA
tccagatcttgagctgactgcccaagga

SEQ ID NO: 70 - DNA, 28 bp, synthetic construct
  misc_feature 1..28: note = HvDWARF11-66
  source 1..28: mol_type = other DNA
ttcactaggtccagatcttgagctgact

SEQ ID NO: 71 - DNA, 28 bp, synthetic construct
  misc_feature 1..28: note = HvDWARF11-67
  source 1..28: mol_type = other DNA
ttcgctttggtagatcttatgccttgat

SEQ ID NO: 72 - DNA, 28 bp, synthetic construct
  misc_feature 1..28: note = HvDWARF11-68
  source 1..28: mol_type = other DNA
tccatcttcttgtagtcctcagagctca

SEQ ID NO: 73 - DNA, 28 bp, synthetic construct
  misc_feature 1..28: note = HvDWARF11-69
  source 1..28: mol_type = other DNA
ttccatcttcttgtagtcctcagagctc

SEQ ID NO: 74 - DNA, 28 bp, synthetic construct
  misc_feature 1..28: note = HvDWARF11-70
  source 1..28: mol_type = other DNA
ttccatctggctggaaagtcctacctgt

SEQ ID NO: 75 - DNA, 28 bp, synthetic construct
  misc_feature 1..28: note = HvDWARF11-71
  source 1..28: mol_type = other DNA
tccatctggctggaaagtcctacctgtt

SEQ ID NO: 76 - DNA, 28 bp, synthetic construct
  misc_feature 1..28: note = HvDWARF11-72
  source 1..28: mol_type = other DNA
tccagccagatggaatcagatactctgc

SEQ ID NO: 77 - DNA, 28 bp, synthetic construct
  misc_feature 1..28: note = HvDWARF11-73
  source 1..28: mol_type = other DNA
ttccagccagatggaatcagatactctg

SEQ ID NO: 78 - DNA, 28 bp, synthetic construct
  misc_feature 1..28: note = HvDWARF11-74
  source 1..28: mol_type = other DNA
ttcatctgaacccctcacttcatggaaa

SEQ ID NO: 79 - DNA, 28 bp, synthetic construct
  misc_feature 1..28: note = HvDWARF11-75
  source 1..28: mol_type = other DNA
ttcagatgaacagcactaaaaacaggta

SEQ ID NO: 80 - DNA, 28 bp, synthetic construct
  misc_feature 1..28: note = HvDWARF11-76
  source 1..28: mol_type = other DNA
ttcatggaaatgcccaacagtttcagcc

SEQ ID NO: 81 - DNA, 28 bp, synthetic construct
  misc_feature 1..28: note = HvDWARF11-77
  source 1..28: mol_type = other DNA
tccatgaagtgaggggttcagatgaaca

SEQ ID NO: 82 - DNA, 28 bp, synthetic construct
  misc_feature 1..28: note = HvDWARF11-78
  source 1..28: mol_type = other DNA
ttcagccttgcagatgggaggtatgtcc

SEQ ID NO: 83 - DNA, 28 bp, synthetic construct
  misc_feature 1..28: note = HvDWARF11-79
  source 1..28: mol_type = other DNA
tcccatctgcaaggctgaaactgttggg

SEQ ID NO: 84 - DNA, 28 bp, synthetic construct
  misc_feature 1..28: note = HvDWARF11-80
  source 1..28: mol_type = other DNA
ttcggcggtggcaccaggctctgccctg

SEQ ID NO: 85 - DNA, 28 bp, synthetic construct
  misc_feature 1..28: note = HvDWARF11-81
  source 1..28: mol_type = other DNA
tccagggcagagcctggtgccaccgccg

SEQ ID NO: 86 - DNA, 28 bp, synthetic construct
  misc_feature 1..28: note = HvDWARF11-82
  source 1..28: mol_type = other DNA
ttcctccatcaccttgtgctgaatttca

SEQ ID NO: 87 - DNA, 28 bp, synthetic construct
  misc_feature 1..28: note = HvDWARF11-83
  source 1..28: mol_type = other DNA
tccatcaccttgtgctgaatttcaggta

SEQ ID NO: 88 - DNA, 28 bp, synthetic construct
  misc_feature 1..28: note = HvDWARF11-84
  source 1..28: mol_type = other DNA
ttcagcacaaggtgatggaggaagaaag

SEQ ID NO: 89 - DNA, 28 bp, synthetic construct
  misc_feature 1..28: note = HvDWARF11-85
  source 1..28: mol_type = other DNA
ttccaatggcatacccgtacgtggagtt

SEQ ID NO: 90 - DNA, 28 bp, synthetic construct
  misc_feature 1..28: note = HvDWARF11-86
  source 1..28: mol_type = other DNA
tccaatggcatacccgtacgtggagttc

SEQ ID NO: 91 - DNA, 28 bp, synthetic construct
  misc_feature 1..28: note = HvDWARF11-87
  source 1..28: mol_type = other DNA
tccacgtacgggtatgccattggaatgt

SEQ ID NO: 92 - DNA, 28 bp, synthetic construct
  misc_feature 1..28: note = HvDWARF11-88
  source 1..28: mol_type = other DNA
ttcccgagaggcctgccgatcgaaatcg

SEQ ID NO: 93 - DNA, 28 bp, synthetic construct
  misc_feature 1..28: note = HvDWARF11-89
  source 1..28: mol_type = other DNA
tcccgagaggcctgccgatcgaaatcga

SEQ ID NO: 94 - DNA, 28 bp, synthetic construct
  misc_feature 1..28: note = HvDWARF11-90
  source 1..28: mol_type = other DNA
ttcgatcggcaggcctctcgggaactcc

SEQ ID NO: 95 - DNA, 28 bp, synthetic construct
  misc_feature 1..28: note = HvDWARF11-91
  source 1..28: mol_type = other DNA
ttcagagcaaattggctcgatttcgatc

SEQ ID NO: 96 - DNA, 28 bp, synthetic construct
  source 1..28: mol_type = other DNA
  misc_feature 1..28: note = HvMyb80-1
tttcctgcaatgccggcctgcccccctc

SEQ ID NO: 97 - DNA, 28 bp, synthetic construct
  source 1..28: mol_type = other DNA
  misc_feature 1..28: note = HvMyb80-2
tttggatccgattgcgtactctgggact

SEQ ID NO: 98 - DNA, 28 bp, synthetic construct
  source 1..28: mol_type = other DNA
  misc_feature 1..28: note = HvMyb80-3
ttcacgttgtccttctcgcagcaaggga

SEQ ID NO: 99 - DNA, 28 bp, synthetic construct
  source 1..28: mol_type = other DNA
  misc_feature 1..28: note = HvMyb80-4
ttcctcgggcgtccactgcccgcgcttc

SEQ ID NO: 100 - DNA, 28 bp, synthetic construct
  source 1..28: mol_type = other DNA
  misc_feature 1..28: note = HvMyb80-5
ttcccgcagcgctgcagcccggcgttct

SEQ ID NO: 101 - DNA, 28 bp, synthetic construct
  source 1..28: mol_type = other DNA
  misc_feature 1..28: note = HvMyb80-6
ttcactgacgccgaggagcagaccatca

SEQ ID NO: 102 - DNA, 28 bp, synthetic construct
  source 1..28: mol_type = other DNA
  misc_feature 1..28: note = HvMyb80-7
ttccagtggttcttgacgtcgttgtccg

SEQ ID NO: 103 - DNA, 28 bp, synthetic construct
  source 1..28: mol_type = other DNA
  misc_feature 1..28: note = HvMyb80-8
ttcaaggacgagatgctccacctcctca

SEQ ID NO: 104 - DNA, 28 bp, synthetic construct
  source 1..28: mol_type = other DNA
  misc_feature 1..28: note = HvMyb80-9
ttcccctcgcccgccatgcccgacatgg

SEQ ID NO: 105 - DNA, 28 bp, synthetic construct
  source 1..28: mol_type = other DNA
  misc_feature 1..28: note = HvMyb80-10
ttcgccgcgccgccacaagccgacgaca

SEQ ID NO: 106 - DNA, 28 bp, synthetic construct
  source 1..28: mol_type = other DNA
  misc_feature 1..28: note = HvMyb80-11
ttcaacccggcgcaggcgacggagttcc

SEQ ID NO: 107 - DNA, 28 bp, synthetic construct
  source 1..28: mol_type = other DNA
  misc_feature 1..28: note = HvMyb80-12
ttccggtacgaagggacggcgtcggggt

SEQ ID NO: 108 - DNA, 28 bp, synthetic construct
  source 1..28: mol_type = other DNA
  misc_feature 1..28: note = HvMyb80-13
ttcgtaccggaactccgtcgcctgcgcc

SEQ ID NO: 109 - DNA, 28 bp, synthetic construct
  source 1..28: mol_type = other DNA
  misc_feature 1..28: note = HvMyb80-14
ttcctgcaatgccggcctgcccccctcg

SEQ ID NO: 110 - DNA, 28 bp, synthetic construct
  source 1..28: mol_type = other DNA
  misc_feature 1..28: note = HvMyb80-15
tttcctgcaatgccggcctgcccccctc

SEQ ID NO: 111 - DNA, 28 bp, synthetic construct
  source 1..28: mol_type = other DNA
  misc_feature 1..28: note = HvMyb80-16
ttccgcctcatcgtcgccgcggctgctg

SEQ ID NO: 112 - DNA, 28 bp, synthetic construct
  source 1..28: mol_type = other DNA
  misc_feature 1..28: note = HvMyb80-17
ttccctccatccttgccgtcttccgcct

SEQ ID NO: 113 - DNA, 28 bp, synthetic construct
  source 1..28: mol_type = other DNA
  misc_feature 1..28: note = HvMyb80-18
ttcccttccctccatccttgccgtcttc

SEQ ID NO: 114 - DNA, 28 bp, synthetic construct
  source 1..28: mol_type = other DNA
  misc_feature 1..28: note = HvMyb80-19
ttcgtgagctcgtcgggcaagtcccaga

SEQ ID NO: 115 - DNA, 1461 bp, synthetic construct
  source 1..1461: mol_type = other DNA; note = Dwarf11 cDNA sequence - AET2Gv20748100.1
gtgggggtgggcgatcttgtgctggctgctccggcgatcctgctcgccttgctcctgactctggtgctgagccacttcctgcctttgctcctcaaccccaaggctccgaggggcagctttggatggccccttgttggcgagaccctcaggttcctcacccctcacgcctccaacacgctgggtagcttcctggaggatcactgctccaggtacgggagggtgttcaagtcccatctgttctgcacccccaccgtagtgtcctgtgaccaggagctgaaccacttcatcctgcagaatgaggagaggctgttccagtgcagctaccccaggccaattcatggcatactgggcaagtcctccatgctggtggtcctgggggaggaccacaagcggctcaggaaccttgctctggccctggtcacctccacgaagctcaagccaagctaccttggcgacattgagaggattgcgctgcacatagtcggatcatggcatggcaagggcggcaacatcaccttctgcgaggaggcaagaaaggttggtcgccccgtgcatgcactaactacaaccaaatttgcattcagtgtgatagtgaagcaggtgctggggctgtcaccggaggagcctgtcactgccatgatactggaggacttcctcaccttcatgaagggcctcatctctttccctctccgcatcccagggaccccatacgccaaagctgtccaggccagagagaggatatcaagcactgtgaagggcattatcgaggagaggaggaaggctgactgctgcaagagggatgatttcctcaacgtgctcctgtcaaccgatgaactctctgacgaggagaaagttagttttgtgctggactccctgctaggaggatatgagaccacctcactcatgatctccatggtcgtctacttccttgggcagtcagctcaagatctggacctggtgaagagggagcatcaaggcataagatctaccaaagcaaaggaggagtgcttgagctccgaggactacaagaagatggaatatacccaacatgttatcaatgaggcgctgagatgtggaaacattgtcaagtttgtccacaggaaggccctcaaagatgtcagatacaaagagtatctgattccatctggctggaaggtcctacctgttttcagtgctgttcatttgaacccctcgcttcatggaaatgcccaacagtttcagccttgcagatgggagggcccaagccaaggtacaagcaagaagtttacgccgttcggcggtggcaccaggctctgccctggatcagagcttgccaaagtagaggctgctttcttcctccatcaccttgtgctcaatttcagatggaaaatcgatggcgatgacattccaatggcatacccgtacgtggagttcccgagaggcctgccgatcgaaatcgagccgatttgctctgaatcttga

SEQ ID NO: 116 - DNA, 1461 bp, synthetic construct; identical to SEQ ID NO: 115
  source 1..1461: mol_type = other DNA

SEQ ID NO: 117 - protein, 486 aa, synthetic construct
  source 1..486: note = Dwarf11 protein sequence - AET2Gv20748100.1
VGVGDLVLAAPAILLALLLTLVLSHFLPLLLNPKAPRGSFGWPLVGETLRFLTPHASNTLGSFLEDHCSRYGRVFKSHLFCTPTVVSCDQELNHFILQNEERLFQCSYPRPIHGILGKSSMLVVLGEDHKRLRNLALALVTSTKLKPSYLGDIERIALHIVGSWHGKGGNITFCEEARKVGRPVHALTTTKFAFSVIVKQVLGLSPEEPVTAMILEDFLTFMKGLISFPLRIPGTPYAKAVQARERISSTVKGIIEERRKADCCKRDDFLNVLLSTDELSDEEKVSFVLDSLLGGYETTSLMISMVVYFLGQSAQDLDLVKREHQGIRSTKAKEECLSSEDYKKMEYTQHVINEALRCGNIVKFVHRKALKDVRYKEYLIPSGWKVLPVFSAVHLNPSLHGNAQQFQPCRWEGPSQGTSKKFTPFGGGTRLCPGSELAKVEAAFFLHHLVLNFRWKIDGDDIPMAYPYVEFPRGLPIEIEPICSES

SEQ ID NO: 118 - DNA, 1304 bp, synthetic construct
  source 1..1304: mol_type = other DNA; note = Dwarf11 cDNA sequence - AET2Gv20748100.9
ccccaggccaattcatggcatactgggcaagtcctccatgctggtggtcctgggggaggaccacaagcggctcaggaaccttgctctggccctggtcacctccacgaagctcaagccaagctaccttggcgacattgagaggattgcgctgcacatagtcggatcatggcatggcaagggcggcaacatcaccttctgcgaggaggcaagaaaggttgtttgcattcagtgtgatagtgaagcaggtgctggggctgtcaccggaggagcctgtcactgccatgatactggaggacttcctcaccttcatgaagggcctcatctctttccctctccgcatcccagggaccccatacgccaaagctgtccaggccagagagaggatatcaagcactgtgaagggcattatcgaggagaggaggaaggctgactgctgcaagagggatgatttcctcaacgtgctcctgtcaaccgatgaactctctgacgaggagaaagttagttttgtgctggactccctgctaggaggatatgagaccacctcactcatgatctccatggtcgtctacttccttgggcagtcagctcaagatctggacctggtgaagagggagcatcaaggcataagatctaccaaagcaaaggaggagtgcttgagctccgaggactacaagaagatggaatatacccaacatgttatcaatgaggcgctgagatgtggaaacattgtcaagtttgtccacaggaaggccctcaaagatgtcagatacaaagagtatctgattccatctggctggaaggtcctacctgttttcagtgctgttcatttgaacccctcgcttcatggaaatgcccaacagtttcagccttgcagatgggagggcccaagccaaggtacaagcaagaagtttacgccgttcggcggtggcaccaggctctgccctggatcagagcttgccaaagtagaggctgctttcttcctccatcaccttgtgctcaatttcagatggaaaatcgatggcgatgacattccaatggcatacccgtacgtggagttcccgagaggcctgccgatcgaaatcgagccgatttgctctgaatcttgactgggttcttgcagctgcagacatggtggtgagtgaaaaaagagattgcaagcaatgaagaagcaccgatgactagcttagcttagctagttgctggaatggggtagctgaggaggttgtgatctcctctgtacatggtgtacatatattttgtccattgtgattactcgaggtggttgggtcaccctgttacatcct

SEQ ID NO: 119 - DNA, 936 bp, synthetic construct
  source 1..936: mol_type = other DNA; note = Dwarf11 coding sequence - AET2Gv20748100.9
atggcaagggcggcaacatcaccttctgcgaggaggcaagaaaggttgtttgcattcagtgtgatagtgaagcaggtgctggggctgtcaccggaggagcctgtcactgccatgatactggaggacttcctcaccttcatgaagggcctcatctctttccctctccgcatcccagggaccccatacgccaaagctgtccaggccagagagaggatatcaagcactgtgaagggcattatcgaggagaggaggaaggctgactgctgcaagagggatgatttcctcaacgtgctcctgtcaaccgatgaactctctgacgaggagaaagttagttttgtgctggactccctgctaggaggatatgagaccacctcactcatgatctccatggtcgtctacttccttgggcagtcagctcaagatctggacctggtgaagagggagcatcaaggcataagatctaccaaagcaaaggaggagtgcttgagctccgaggactacaagaagatggaatatacccaacatgttatcaatgaggcgctgagatgtggaaacattgtcaagtttgtccacaggaaggccctcaaagatgtcagatacaaagagtatctgattccatctggctggaaggtcctacctgttttcagtgctgttcatttgaacccctcgcttcatggaaatgcccaacagtttcagccttgcagatgggagggcccaagccaaggtacaagcaagaagtttacgccgttcggcggtggcaccaggctctgccctggatcagagcttgccaaagtagaggctgctttcttcctccatcaccttgtgctcaatttcagatggaaaatcgatggcgatgacattccaatggcatacccgtacgtggagttcccgagaggcctgccgatcgaaatcgagccgatttgctctgaatcttga

SEQ ID NO: 120 - protein, 311 aa, synthetic construct
  source 1..311: note = Dwarf11 protein sequence - AET2Gv20748100.9
MARAATSPSARRQERLFAFSVIVKQVLGLSPEEPVTAMILEDFLTFMKGLISFPLRIPGTPYAKAVQARERISSTVKGIIEERRKADCCKRDDFLNVLLSTDELSDEEKVSFVLDSLLGGYETTSLMISMVVYFLGQSAQDLDLVKREHQGIRSTKAKEECLSSEDYKKMEYTQHVINEALRCGNIVKFVHRKALKDVRYKEYLIPSGWKVLPVFSAVHLNPSLHGNAQQFQPCRWEGPSQGTSKKFTPFGGGTRLCPGSELAKVEAAFFLHHLVLNFRWKIDGDDIPMAYPYVEFPRGLPIEIEPICSES

SEQ ID NO: 121 - DNA, 1089 bp, synthetic construct
  source 1..1089: mol_type = other DNA; note = Dwarf11 cDNA sequence - AET2Gv20748100.2
gggcgatcttgtgctggctgctccggcgatcctgctcgccttgctcctgactctggtgctgagccacttcctgcctttgctcctcaaccccaaggctccgaggggcagctttggatggccccttgttggcgagaccctcaggttcctcacccctcacgcctccaacacgctgggtagcttcctggaggatcactgctccaggtacgggagggtgttcaagtcccatctgttctgcacccccaccgtagtgtcctgtgaccaggagctgaaccacttcatcctgcagaatgaggagaggctgttccagtgcagctaccccaggccaattcatggcatactgggcaagtcctccatgctggtggtcctgggggaggaccacaagcggctcaggaaccttgctctggccctggtcacctccacgaagctcaagccaagctaccttggcgacattgagaggattgcgctgcacatagtcggatcatggcatggcaagggcggcaacatcaccttctgcgaggaggcaagaaagtttgcattcagtgtgatagtgaagcaggtgctggggctgtcaccggaggagcctgtcactgccatgatactggaggacttcctcaccttcatgaagggcctcatctctttccctctccgcatcccagggaccccatacgccaaagctgtccaggccagagagaggatatcaagcactgtgaagggcattatcgaggagaggaggaaggctgactgctgcaagagggatgatttcctcaacgtgctcctgtcaaccgatgaactctctgacgaggagaaagttagttttgtgctggactccctgctaggaggatatgagaccacctcactcatgatctccatggtcgtctacttccttgggcagtcagctcaagatctggacctggtgaagagggagcatcaaggcataagatctaccaaagcaaaggaggagtgcttgagctccgaggactacaagaagatggaatatacccaacatgttatcaatgaggcgctgagatgtggaaacattgtcaagtttgtccacaggaaggccctcaaagatgtcagatacaaaggtaa

SEQ ID NO: 122 - DNA, 1086 bp, synthetic construct
  source 1..1086: mol_type = other DNA; note = Dwarf11 coding sequence - AET2Gv20748100.2
ggcgatcttgtgctggctgctccggcgatcctgctcgccttgctcctgactctggtgctgagccacttcctgcctttgctcctcaaccccaaggctccgaggggcagctttggatggccccttgttggcgagaccctcaggttcctcacccctcacgcctccaacacgctgggtagcttcctggaggatcactgctccaggtacgggagggtgttcaagtcccatctgttctgcacccccaccgtagtgtcctgtgaccaggagctgaaccacttcatcctgcagaatgaggagaggctgttccagtgcagctaccccaggccaattcatggcatactgggcaagtcctccatgctggtggtcctgggggaggaccacaagcggctcaggaaccttgctctggccctggtcacctccacgaagctcaagccaagctaccttggcgacattgagaggattgcgctgcacatagtcggatcatggcatggcaagggcggcaacatcaccttctgcgaggaggcaagaaagtttgcattcagtgtgatagtgaagcaggtgctggggctgtcaccggaggagcctgtcactgccatgatactggaggacttcctcaccttcatgaagggcctcatctctttccctctccgcatcccagggaccccatacgccaaagctgtccaggccagagagaggatatcaagcactgtgaagggcattatcgaggagaggaggaaggctgactgctgcaagagggatgatttcctcaacgtgctcctgtcaaccgatgaactctctgacgaggagaaagttagttttgtgctggactccctgctaggaggatatgagaccacctcactcatgatctccatggtcgtctacttccttgggcagtcagctcaagatctggacctggtgaagagggagcatcaaggcataagatctaccaaagcaaaggaggagtgcttgagctccgaggactacaagaagatggaatatacccaacatgttatcaatgaggcgctgagatgtggaaacattgtcaagtttgtccacaggaaggccctcaaagatgtcagatacaaaggt

SEQ ID NO: 123 - protein, 362 aa, synthetic construct
  source 1..362: note = Dwarf11 protein sequence - AET2Gv20748100.2
GDLVLAAPAILLALLLTLVLSHFLPLLLNPKAPRGSFGWPLVGETLRFLTPHASNTLGSFLEDHCSRYGRVFKSHLFCTPTVVSCDQELNHFILQNEERLFQCSYPRPIHGILGKSSMLVVLGEDHKRLRNLALALVTSTKLKPSYLGDIERIALHIVGSWHGKGGNITFCEEARKFAFSVIVKQVLGLSPEEPVTAMILEDFLTFMKGLISFPLRIPGTPYAKAVQARERISSTVKGIIEERRKADCCKRDDFLNVLLSTDELSDEEKVSFVLDSLLGGYETTSLMISMVVYFLGQSAQDLDLVKREHQGIRSTKAKEECLSSEDYKKMEYTQHVINEALRCGNIVKFVHRKALKDVRYKG

SEQ ID NO: 124 - DNA, 1689 bp, synthetic construct
  source 1..1689: mol_type = other DNA; note = Dwarf11 cDNA sequence - AET2Gv20748100.7
gtgctggctgctccggcgatcctgctcgccttgctcctgactctggtgctgagccacttcctgcctttgctcctcaaccccaaggctccgaggggcagctttggatggccccttgttggcgagaccctcaggttcctcacccctcacgcctccaacacgctgggtagcttcctggaggatcactgctccaggtacgggagggtgttcaagtcccatctgttctgcacccccaccgtagtgtcctgtgaccaggagctgaaccacttcatcctgcagaatgaggagaggctgttccagtgcagctaccccaggccaattcatggcatactgggcaagtcctccatgctggtggtcctgggggaggaccacaagcggctcaggaaccttgctctggccctggtcacctccacgaagctcaagccaagctaccttggcgacattgagaggattgcgctgcacatagtcggatcatggcatggcaagggcggcaacatcaccttctgcgaggaggcaagaaagtttgcattcagtgtgatagtgaagcaggtgctggggctgtcaccggaggagcctgtcactgccatgatactggaggacttcctcaccttcatgaagggcctcatctctttccctctccgcatcccagggaccccatacgccaaagctgtccaggccagagagaggatatcaagcactgtgaagggcattatcgaggagaggaggaaggctgactgctgcaagagggatgatttcctcaacgtgctcctgtcaaccgatgaactctctgacgaggagaaagttagttttgtgctggactccctgctaggaggatatgagaccacctcactcatgatctccatggtcgtctacttccttgggcagtcagctcaagatctggacctggtgaagagggagcatcaaggcataagatctaccaaagcaaaggaggagtgcttgagctccgaggactacaagaagatggaatatacccaacatgttatcaatgaggcgctgagatgtggaaacattgtcaagtttgtccacaggaaggccctcaaagatgtcagatacaaagagtatctgattccatctggctggaaggtcctacctgttttcagtgctgttcatttgaacccctcgcttcatggaaatgcccaacagtttcagccttgcagatgggagggcccaagccaaggtacaagcaagaagtttacgccgttcggcggtggcaccaggctctgccctggatcagagcttgccaaagtagaggctgctttcttcctccatcaccttgtgctcaatttcagatggaaaatcgatggcgatgacattccaatggcatacccgtacgtggagttcccgagaggcctgccgatcgaaatcgagccgatttgctctgaatcttgactgggttcttgcagctgcagacatggtggtgagtgaaaaaagagattgcaagcaatgaagaagcaccgatgactagcttagcttagctagttgctggaatggggtagctgaggaggttgtgatctcctctgtacatggtgtacatatattttgtccattgtgattactcgaggtggttgggtcaccctgttacatcctccactgtctggactattatcctatagaaaaaaatgggctcctggtgtttacatttacttctgaaattcagtatggggagatatg

SEQ ID NO: 125 - DNA, 1407 bp, synthetic construct
  source 1..1407: mol_type = other DNA; note = Dwarf11 coding sequence - AET2Gv20748100.7
gtgctggctgctccggcgatcctgctcgccttgctcctgactctggtgctgagccacttcctgcctttgctcctcaaccccaaggctccgaggggcagctttggatggccccttgttggcgagaccctcaggttcctcacccctcacgcctccaacacgctgggtagcttcctggaggatcactgctccaggtacgggagggtgttcaagtcccatctgttctgcacccccaccgtagtgtcctgtgaccaggagctgaaccacttcatcctgcagaatgaggagaggctgttccagtgcagctaccccaggccaattcatggcatactgggcaagtcctccatgctggtggtcctgggggaggaccacaagcggctcaggaaccttgctctggccctggtcacctccacgaagctcaagccaagctaccttggcgacattgagaggattgcgctgcacatagtcggatcatggcatggcaagggcggcaacatcaccttctgcgaggaggcaagaaagtttgcattcagtgtgatagtgaagcaggtgctggggctgtcaccggaggagcctgtcactgccatgatactggaggacttcctcaccttcatgaagggcctcatctctttccctctccgcatcccagggaccccatacgccaaagctgtccaggccagagagaggatatcaagcactgtgaagggcattatcgaggagaggaggaaggctgactgctgcaagagggatgatttcctcaacgtgctcctgtcaaccgatgaactctctgacgaggagaaagttagttttgtgctggactccctgctaggaggatatgagaccacctcactcatgatctccatggtcgtctacttccttgggcagtcagctcaagatctggacctggtgaagagggagcatcaaggcataagatctaccaaagcaaaggaggagtgcttgagctccgaggactacaagaagatggaatatacccaacatgttatcaatgaggcgctgagatgtggaaacattgtcaagtttgtccacaggaaggccctcaaagatgtcagatacaaagagtatctgattccatctggctggaaggtcctacctgttttcagtgctgttcatttgaacccctcgcttcatggaaatgcccaacagtttcagccttgcagatgggagggcccaagccaaggtacaagcaagaagtttacgccgttcggcggtggcaccaggctctgccctggatcagagcttgccaaagtagaggctgctttcttcctccatcaccttgtgctcaatttcagatggaaaatcgatggcgatgacattccaatggcatacccgtacgtggagttcccgagaggcctgccgatcgaaatcgagccgatttgctctgaatcttga

SEQ ID NO: 126 - protein, 468 aa, synthetic construct
  source 1..468: note = Dwarf11 protein sequence - AET2Gv20748100.7
VLAAPAILLALLLTLVLSHFLPLLLNPKAPRGSFGWPLVGETLRFLTPHASNTLGSFLEDHCSRYGRVFKSHLFCTPTVVSCDQELNHFILQNEERLFQCSYPRPIHGILGKSSMLVVLGEDHKRLRNLALALVTSTKLKPSYLGDIERIALHIVGSWHGKGGNITFCEEARKFAFSVIVKQVLGLSPEEPVTAMILEDFLTFMKGLISFPLRIPGTPYAKAVQARERISSTVKGIIEERRKADCCKRDDFLNVLLSTDELSDEEKVSFVLDSLLGGYETTSLMISMVVYFLGQSAQDLDLVKREHQGIRSTKAKEECLSSEDYKKMEYTQHVINEALRCGNIVKFVHRKALKDVRYKEYLIPSGWKVLPVFSAVHLNPSLHGNAQQFQPCRWEGPSQGTSKKFTPFGGGTRLCPGSELAKVEAAFFLHHLVLNFRWKIDGDDIPMAYPYVEFPRGLPIEIEPICSES

SEQ ID NO: 127 - DNA, 498 bp, synthetic construct
  source 1..498: mol_type = other DNA; note = Dwarf11 cDNA sequence - AET2Gv20748100.10
tcaggccagagagaggatatcaagcactgtgaagggcattatcgaggagaggaggaaggctgactgctgcaagagggatgatttcctcaacgtgctcctgtcaaccgatgaactctctgacgaggagaaagttagttttgtgctggactccctgctaggaggatatgagaccacctcactcatgatctccatggtcgtctacttccttgggcagtcagctcaagatctggacctggtgaaggtacataccatacctgatcaagcttaagccacaggtgattggtggttgtgtgcatgtcacttattatatatgaacatgctgtgcatgcagagggagcatcaaggcataagatctaccaaagcaaaggaggagtgcttgagctccgaggactacaagaagatggaatatacccaacatgttatcaatgaggcgctgagatgtggaaacattgtcaagtttgtccacaggaaggccctcaaagatgtcagatacaaagg

SEQ ID NO: 128 - DNA, 267 bp, synthetic construct
  source 1..267: mol_type = other DNA; note = Dwarf11 coding sequence - AET2Gv20748100.10
caggccagagagaggatatcaagcactgtgaagggcattatcgaggagaggaggaaggctgactgctgcaagagggatgatttcctcaacgtgctcctgtcaaccgatgaactctctgacgaggagaaagttagttttgtgctggactccctgctaggaggatatgagaccacctcactcatgatctccatggtcgtctacttccttgggcagtcagctcaagatctggacctggtgaaggtacataccatacctgatcaagcttaa

SEQ ID NO: 129 - protein, 88 aa, synthetic construct
  source 1..88: note = Dwarf11 protein sequence - AET2Gv20748100.10
QARERISSTVKGIIEERRKADCCKRDDFLNVLLSTDELSDEEKVSFVLDSLLGGYETTSLMISMVVYFLGQSAQDLDLVKVHTIPDQA

SEQ ID NO: 130 - DNA, 1728 bp, synthetic construct
  source 1..1728: mol_type = other DNA; note = Dwarf11 cDNA sequence - AET2Gv20748100.8
ctggctgctccggcgatcctgctcgccttgctcctgactctggtgctgagccacttcctgcctttgctcctcaaccccaaggctccgaggggcagctttggatggccccttgttggcgagaccctcaggttcctcacccctcacgcctccaacacgctgggtagcttcctggaggatcactgctccaggtacgggagggtgttcaagtcccatctgttctgcacccccaccgtagtgtcctgtgaccaggagctgaaccacttcatcctgcagaatgaggagaggctgttccagtgcagctaccccaggccaattcatggcatactgggcaagtcctccatgctggtggtcctgggggaggaccacaagcggctcaggaaccttgctctggccctggtcacctccacgaagctcaagccaagctaccttggcgacattgagaggattgcgctgcacatagtcggatcatggcatggcaagggcggcaacatcaccttctgcgaggaggcaagaaagtttgcattcagtgtgatagtgaagcaggtgctggggctgtcaccggaggagcctgtcactgccatgatactggaggacttcctcaccttcatgaagggcctcatctctttccctctccgcatcccagggaccccatacgccaaagctgtccaggccagagagaggatatcaagcactgtgaagggcattatcgaggagaggaggaaggctgactgctgcaagagggatgatttcctcaacgtgctcctgtcaaccgatgaactctctgacgaggagaaagttagttttgtgctggactccctgctaggaggatatgagaccacctcactcatgatctccatggtcgtctacttccttgggcagtcagctcaagatctggacctggtgaaggtacataccatacctgatcaagcttaagccacaggtgattggtggttgtgtgcatgtcacttattatatatgaacatgctgtgcatgcagagggagcatcaaggcataagatctaccaaagcaaaggaggagtgcttgagctccgaggactacaagaagatggaatatacccaacatgttatcaatgaggcgctgagatgtggaaacattgtcaagtttgtccacaggaaggccctcaaagatgtcagatacaaagagtatctgattccatctggctggaaggtcctacctgttttcagtgctgttcatttgaacccctcgcttcatggaaatgcccaacagtttcagccttgcagatgggagggcccaagccaaggtacaagcaagaagtttacgccgttcggcggtggcaccaggctctgccctggatcagagcttgccaaagtagaggctgctttcttcctccatcaccttgtgctcaatttcagatggaaaatcgatggcgatgacattccaatggcatacccgtacgtggagttcccgagaggcctgccgatcgaaatcgagccgatttgctctgaatcttgactgggttcttgcagctgcagacatggtggtgagtgaaaaaagagattgcaagcaatgaagaagcaccgatgactagcttagcttagctagttgctggaatggggtagctgaggaggttgtgatctcctctgtacatggtgtacatatattttgtccattgtgattactcgaggtggttgggtcaccctgttacatcctccactgtctggactattatcctatagaaaaaaatgg

SEQ ID NO: 131 - DNA, 933 bp, synthetic construct
  source 1..933: mol_type = other DNA; note = Dwarf11 coding sequence - AET2Gv20748100.8
ctggctgctccggcgatcctgctcgccttgctcctgactctggtgctgagccacttcctgcctttgctcctcaaccccaaggctccgaggggcagctttggatggccccttgttggcgagaccctcaggttcctcacccctcacgcctccaacacgctgggtagcttcctggaggatcactgctccaggtacgggagggtgttcaagtcccatctgttctgcacccccaccgtagtgtcctgtgaccaggagctgaaccacttcatcctgcagaatgaggagaggctgttccagtgcagctaccccaggccaattcatggcatactgggcaagtcctccatgctggtggtcctgggggaggaccacaagcggctcaggaaccttgctctggccctggtcacctccacgaagctcaagccaagctaccttggcgacattgagaggattgcgctgcacatagtcggatcatggcatggcaagggcggcaacatcaccttctgcgaggaggcaagaaagtttgcattcagtgtgatagtgaagcaggtgctggggctgtcaccggaggagcctgtcactgccatgatactggaggacttcctcaccttcatgaagggcctcatctctttccctctccgcatcccagggaccccatacgccaaagctgtccaggccagagagaggatatcaagcactgtgaagggcattatcgaggagaggaggaaggctgactgctgcaagagggatgatttcctcaacgtgctcctgtcaaccgatgaactctctgacgaggagaaagttagttttgtgctggactccctgctaggaggatatgagaccacctcactcatgatctccatggtcgtctacttccttgggcagtcagctcaagatctggacctggtgaaggtacataccatacctgatcaagcttaa

SEQ ID NO: 132 - protein, 310 aa, synthetic construct
  source 1..310: note = Dwarf11 protein sequence - AET2Gv20748100.8
LAAPAILLALLLTLVLSHFLPLLLNPKAPRGSFGWPLVGETLRFLTPHASNTLGSFLEDHCSRYGRVFKSHLFCTPTVVSCDQELNHFILQNEERLFQCSYPRPIHGILGKSSMLVVLGEDHKRLRNLALALVTSTKLKPSYLGDIERIALHIVGSWHGKGGNITFCEEARKFAFSVIVKQVLGLSPEEPVTAMILEDFLTFMKGLISFPLRIPGTPYAKAVQARERISSTVKGIIEERRKADCCKRDDFLNVLLSTDELSDEEKVSFVLDSLLGGYETTSLMISMVVYFLGQSAQDLDLVKVHTIPDQA

SEQ ID NO: 133 - DNA, 2026 bp, synthetic construct
  source 1..2026: mol_type = other DNA; note = Dwarf11 cDNA sequence - AET2Gv20748100.4
gcgatcttgtgctggctgctccggcgatcctgctcgccttgctcctgactctggtgctgagccacttcctgcctttgctcctcaaccccaaggctccgaggggcagctttggatggccccttgttggcgagaccctcaggttcctcacccctcacgcctccaacacgctgggtagcttcctggaggatcactgctccaggtacgggagggtgttcaagtcccatctgttctgcacccccaccgtagtgtcctgtgaccaggagctgaaccacttcatcctgcagaatgaggagaggctgttccagtgcagctaccccaggccaattcatggcatactgggcaagtcctccatgctggtggtcctgggggaggaccacaagcggctcaggaaccttgctctggccctggtcacctccacgaagctcaagccaagctaccttggcgacattgagaggattgcgctgcacatagtcggatcatggcatggcaagggcggcaacatcaccttctgcgaggaggcaagaaagtttgcattcagtgtgatagtgaagcaggtgctggggctgtcaccggaggagcctgtcactgccatgatactggaggacttcctcaccttcatgaagggcctcatctctttccctctccgcatcccagggaccccatacgccaaagctgtccaggccagagagaggatatcaagcactgtgaagggcattatcgaggagaggaggaaggctgactgctgcaagagggatgatttcctcaacgtgctcctgtcaaccgatgaactctctgacgaggagaaagttagttttgtgctggactccctgctaggaggatatgagaccacctcactcatgatctccatggtcgtctacttccttgggcagtcagctcaagatctggacctggtgaagagggagcatcaaggcataagatctaccaaagcaaaggaggagtgcttgagctccgaggactacaagaagatggaatatacccaacatgtaagtaagatgatgatcattcagtacacgctttaggacatgtagccggttggtaagcagggatcctttttctttctattatcagccattcgcacaaatatgtgaccctccaaaactgatgggagttttttttctgtccatatgcctgcctatatctggaattttgactagagcaaacaacactttgcaagaacagtgcagatggggaagggtctcttaatatgttctgtaataattggaatggttcaatgatacatacatacatgcgtggatgtcctttcaggttatcaatgaggcgctgagatgtggaaacattgtcaagtttgtccacaggaaggccctcaaagatgtcagatacaaagagtatctgattccatctggctggaaggtcctacctgttttcagtgctgttcatttgaacccctcgcttcatggaaatgcccaacagtttcagccttgcagatgggagggcccaagccaaggtacaagcaagaagtttacgccgttcggcggtggcaccaggctctgccctggatcagagcttgccaaagtagaggctgctttcttcctccatcaccttgtgctcaatttcagatggaaaatcgatggcgatgacattccaatggcatacccgtacgtggagttcccgagaggcctgccgatcgaaatcgagccgatttgctctgaatcttgactgggttcttgcagctgcagacatggtggtgagtgaaaaaagagattgcaagcaatgaagaagcaccgatgactagcttagcttagctagttgctggaatggggtagctgaggaggttgtgatctcctctgtacatggtgtacatatattttgtccattgtgattactcgaggtggttgggtcaccctgttacatcctccactgtctggactattatcctatagaaaaaaatgggctcctggtgtttacatttacttctgaaattcagtatggggagatatgtatgaaccggacctcactgaaacttcgaaacaacgttcctattctt

SEQ ID NO: 134 - DNA, 1038 bp, synthetic construct
  source 1..1038: mol_type = other DNA; note = Dwarf11 coding sequence - AET2Gv20748100.4
gatcttgtgctggctgctccggcgatcctgctcgccttgctcctgactctggtgctgagccacttcctgcctttgctcctcaaccccaaggctccgaggggcagctttggatggccccttgttggcgagaccctcaggttcctcacccctcacgcctccaacacgctgggtagcttcctggaggatcactgctccaggtacgggagggtgttcaagtcccatctgttctgcacccccaccgtagtgtcctgtgaccaggagctgaaccacttcatcctgcagaatgaggagaggctgttccagtgcagctaccccaggccaattcatggcatactgggcaagtcctccatgctggtggtcctgggggaggaccacaagcggctcaggaaccttgctctggccctggtcacctccacgaagctcaagccaagctaccttggcgacattgagaggattgcgctgcacatagtcggatcatggcatggcaagggcggcaacatcaccttctgcgaggaggcaagaaagtttgcattcagtgtgatagtgaagcaggtgctggggctgtcaccggaggagcctgtcactgccatgatactggaggacttcctcaccttcatgaagggcctcatctctttccctctccgcatcccagggaccccatacgccaaagctgtccaggccagagagaggatatcaagcactgtgaagggcattatcgaggagaggaggaaggctgactgctgcaagagggatgatttcctcaacgtgctcctgtcaaccgatgaactctctgacgaggagaaagttagttttgtgctggactccctgctaggaggatatgagaccacctcactcatgatctccatggtcgtctacttccttgggcagtcagctcaagatctggacctggtgaagagggagcatcaaggcataagatctaccaaagcaaaggaggagtgcttgagctccgaggactacaagaagatggaatatacccaacatgtaagtaagatgatgatcattcagtacacgctttag

SEQ ID NO: 135 - protein, 345 aa, synthetic construct
  source 1..345: note = Dwarf11 protein sequence - AET2Gv20748100.4
DLVLAAPAILLALLLTLVLSHFLPLLLNPKAPRGSFGWPLVGETLRFLTPHASNTLGSFLEDHCSRYGRVFKSHLFCTPTVVSCDQELNHFILQNEERLFQCSYPRPIHGILGKSSMLVVLGEDHKRLRNLALALVTSTKLKPSYLGDIERIALHIVGSWHGKGGNITFCEEARKFAFSVIVKQVLGLSPEEPVTAMILEDFLTFMKGLISFPLRIPGTPYAKAVQARERISSTVKGIIEERRKADCCKRDDFLNVLLSTDELSDEEKVSFVLDSLLGGYETTSLMISMVVYFLGQSAQDLDLVKREHQGIRSTKAKEECLSSEDYKKMEYTQHVSKMMIIQYTL

SEQ ID NO: 136 - DNA, 1747 bp, synthetic construct
  source 1..1747: mol_type = other DNA; note = Dwarf11 cDNA sequence - AET2Gv20748100.5
gtgctggctgctccggcgatcctgctcgccttgctcctgactctggtgctgagccacttcctgcctttgctcctcaaccccaaggctccgaggggcagctttggatggccccttgttggcgagaccctcaggttcctcacccctcacgcctccaacacgctgggtagcttcctggaggatcactgctccaggtacgggagggtgttcaagtcccatctgttctgcacccccaccgtagtgtcctgtgaccaggagctgaaccacttcatcctgcagaatgaggagaggctgttccagtgcagctaccccaggccaattcatggcatactgggcaagtcctccatgctggtggtcctgggggaggaccacaagcggctcaggaaccttgctctggccctggtcacctccacgaagctcaagccaagctaccttggcgacattgagaggattgcgctgcacatagtcggatcatggcatggcaagggcggcaacatcaccttctgcgaggaggcaagaaagtttgcattcagtgtgatagtgaagcaggtgctggggctgtcaccggaggagcctgtcactgccatgatactggaggacttcctcaccttcatgaagggcctcatctctttccctctccgcatcccagggaccccatacgccaaagctgtccaggccagagagaggatatcaagcactgtgaagggcattatcgaggagaggaggaaggctgactgctgcaagagggatgatttcctcaacgtgctcctgtcaaccgatgaactctctgacgaggagaaagttagttttgtgctggactccctgctaggaggatatgagaccacctcactcatgatctccatggtcgtctacttccttgggcagtcagctcaagatctggacctggtgaagagggagcatcaaggcataagatctaccaaagcaaaggaggagtgcttgagctccgaggactacaagaagatggaatatacccaacatgtaagtaagatgatgatcattcagtacacgctttaggacatgtagccggttggtaagcagggatcctttttctttctattatcagccattcgcacaaatatgtgaccctccaaaactgatgggagttttttttctgtccatatgcctgcctatatctggaattttgactagagcaaacaacactttgcaagaacagtgcagatggggaagggtctcttaatatgttctgtaataattggaatggttcaatgatacatacatacatgcgtggatgtcctttcaggttatcaatgaggcgctgagatgtggaaacattgtcaagtttgtccacaggaaggccctcaaagatgtcagatacaaagagtatctgattccatctggctggaaggtcctacctgttttcagtgctgttcatttgaacccctcgcttcatggaaatgcccaacagtttcagccttgcagatgggaggtatgtctgatttccataccatgtgcacgggcatctatatttgtagtcaagtaatgaatacaacttagtttatgcagattagctttaacataatatgcttgtttagggaagcctaactttgacataatatgcttttttgttaaactattttatacaatgaaaaggtgagaacaaatcagaagagcttatctgtagctttgagagaatcttctttaaggttgctctgttaactaattgatgcctttaattagtgagcgtccaactaacccatgccataataat

SEQ ID NO: 137 - DNA, 1032 bp, synthetic construct
  source 1..1032: mol_type = other DNA; note = Dwarf11 coding sequence - AET2Gv20748100.5
gtgctggctgctccggcgatcctgctcgccttgctcctgactctggtgctgagccacttcctgcctttgctcctcaaccccaaggctccgaggggcagctttggatggccccttgttggcgagaccctcaggttcctcacccctcacgcctccaacacgctgggtagcttcctggaggatcactgctccaggtacgggagggtgttcaagtcccatctgttctgcacccccaccgtagtgtcctgtgaccaggagctgaaccacttcatcctgcagaatgaggagaggctgttccagtgcagctaccccaggccaattcatggcatactgggcaagtcctccatgctggtggtcctgggggaggaccacaagcggctcaggaaccttgctctggccctggtcacctccacgaagctcaagccaagctaccttggcgacattgagaggattgcgctgcacatagtcggatcatggcatggcaagggcggcaacatcaccttctgcgaggaggcaagaaagtttgcattcagtgtgatagtgaagcaggtgctggggctgtcaccggaggagcctgtcactgccatgatactggaggacttcctcaccttcatgaagggcctcatctctttccctctccgcatcccagggaccccatacgccaaagctgtccaggccagagagaggatatcaagcactgtgaagggcattatcgaggagaggaggaaggctgactgctgcaagagggatgatttcctcaacgtgctcctgtcaaccgatgaactctctgacgaggagaaagttagttttgtgctggactccctgctaggaggatatgagaccacctcactcatgatctccatggtcgtctacttccttgggcagtcagctcaagatctggacctggtgaagagggagcatcaaggcataagatctaccaaagcaaaggaggagtgcttgagctccgaggactacaagaagatggaatatacccaacatgtaagtaagatgatgatcattcagtacacgctttag

SEQ ID NO: 138 - protein, 343 aa, synthetic construct
  source 1..343: note = Dwarf11 protein sequence - AET2Gv20748100.5
VLAAPAILLALLLTLVLSHFLPLLLNPKAPRGSFGWPLVGETLRFLTPHASNTLGSFLEDHCSRYGRVFKSHLFCTPTVVSCDQELNHFILQNEERLFQCSYPRPIHGILGKSSMLVVLGEDHKRLRNLALALVTSTKLKPSYLGDIERIALHIVGSWHGKGGNITFCEEARKFAFSVIVKQVLGLSPEEPVTAMILEDFLTFMKGLISFPLRIPGTPYAKAVQARERISSTVKGIIEERRKADCCKRDDFLNVLLSTDELSDEEKVSFVLDSLLGGYETTSLMISMVVYFLGQSAQDLDLVKREHQGIRSTKAKEECLSSEDYKKMEYTQHVSKMMIIQYTL

SEQ ID NO: 139 - DNA, 849 bp, synthetic construct
  source 1..849: mol_type = other DNA; note = Dwarf11 cDNA sequence - AET2Gv20748100.12
gtttagggaagcctaactttgacataatatgcttttttgttaaactattttatacaatgaaaaggtgagaacaaatcagaagagcttatctgtagctttgagagaatcttctttaaggttgctctgttaactaattgatgcctttaattagtgagcgtccaactaacccatgccataataattacttgcaactatcctggtatcttcagatgccaagcaggctttggctgagggcctagtgccttctgtacatggtcctaaccatgattcctccctcaaagccagcatccttggctttgcttcttcattttattaactcccttgatgaagctagctcatatgcatgacttgtacaattgattgatgcaacagggcccaagccaaggtacaagcaagaagtttacgccgttcggcggtggcaccaggctctgccctggatcagagcttgccaaagtagaggctgctttcttcctccatcaccttgtgctcaatttcagatggaaaatcgatggcgatgacattccaatggcatacccgtacgtggagttcccgagaggcctgccgatcgaaatcgagccgatttgctctgaatcttgactgggttcttgcagctgcagacatggtggtgagtgaaaaaagagattgcaagcaatgaagaagcaccgatgactagcttagcttagctagttgctggaatggggtagctgaggaggttgtgatctcctctgtacatggtgtacatatattttgtccattgtgattactcgaggtggttgggtcaccctgttacatcctccactgtctggactattatcctatagaaaaaaatgggctcctggtgtttacatt

SEQ ID NO: 140 - DNA, 234 bp, synthetic construct
  source 1..234: mol_type = other DNA; note = Dwarf11 coding sequence - AET2Gv20748100.12
atgcaacagggcccaagccaaggtacaagcaagaagtttacgccgttcggcggtggcaccaggctctgccctggatcagagcttgccaaagtagaggctgctttcttcctccatcaccttgtgctcaatttcagatggaaaatcgatggcgatgacattccaatggcatacccgtacgtggagttcccgagaggcctgccgatcgaaatcgagccgatttgctctgaatcttga

SEQ ID NO: 141 - protein, 77 aa, synthetic construct
  source 1..77: note = Dwarf11 protein sequence - AET2Gv20748100.12
MQQGPSQGTSKKFTPFGGGTRLCPGSELAKVEAAFFLHHLVLNFRWKIDGDDIPMAYPYVEFPRGLPIEIEPICSES

SEQ ID NO: 142 - DNA, 711 bp, synthetic construct
  source 1..711: mol_type = other DNA; note = Dwarf11 cDNA sequence - AET2Gv20748100.11
cagagtatctgattccatctggctggaaggtcctacctgttttcagtgctgttcatttgaacccctcgcttcatggaaatgcccaacagtttcagccttgcagatgggagggcccaagccaaggtacaagcaagaagtttacgccgttcggcggtggcaccaggctctgccctggatcagagcttgccaaagtagaggctgctttcttcctccatcaccttgtgctcaatttcagatggaaaatcgatggcgatgacattccaatggcatacccgtacgtggagttcccgagaggcctgccgatcgaaatcgagccgatttgctctgaatcttgactgggttcttgcagctgcagacatggtggtgagtgaaaaaagagattgcaagcaatgaagaagcaccgatgactagcttagcttagctagttgctggaatggggtagctgaggaggttgtgatctcctctgtacatggtgtacatatattttgtccattgtgattactcgaggtggttgggtcaccctgttacatcctccactgtctggactattatcctatagaaaaaaatgggctcctggtgtttacatttacttctgaaattcagtatggggagatatgtatgaaccggacctcactgaaacttcgaaacaacgttcctattcttaccaaatagatagaccatgtataagggaacattgacataagcacgcca

SEQ ID NO: 143 - DNA, 333 bp, synthetic construct
  source 1..333: mol_type = other DNA; note = Dwarf11 coding sequence - AET2Gv20748100.11
gagtatctgattccatctggctggaaggtcctacctgttttcagtgctgttcatttgaacccctcgcttcatggaaatgcccaacagtttcagccttgcagatgggagggcccaagccaaggtacaagcaagaagtttacgccgttcggcggtggcaccaggctctgccctggatcagagcttgccaaagtagaggctgctttcttcctccatcaccttgtgctcaatttcagatggaaaatcgatggcgatgacattccaatggcatacccgtacgtggagttcccgagaggcctgccgatcgaaatcgagccgatttgctctgaatcttga

SEQ ID NO: 144 - protein, 110 aa, synthetic construct
  source 1..110: note = warf11 protein sequence - AET2Gv20748100.11
EYLIPSGWKVLPVFSAVHLNPSLHGNAQQFQPCRWEGPSQGTSKKFTPFGGGTRLCPGSELAKVEAAFFLHHLVLNFRWKIDGDDIPMAYPYVEFPRGLPIEIEPICSES

SEQ ID NO: 145 - DNA, 1193 bp, synthetic construct
  source 1..1193: mol_type = other DNA; note = Dwarf11 cDNA sequence - AET2Gv20748100.3
ggcgatcttgtgctggctgctccggcgatcctgctcgccttgctcctgactctggtgctgagccacttcctgcctttgctcctcaaccccaaggctccgaggggcagctttggatggccccttgttggcgagaccctcaggttcctcacccctcacgcctccaacacgctgggtagcttcctggaggatcactgctccaggtacgggagggtgttcaagtcccatctgttctgcacccccaccgtagtgtcctgtgaccaggagctgaaccacttcatcctgcagaatgaggagaggctgttccagtgcagctaccccaggccaattcatggcatactgggcaagtcctccatgctggtggtcctgggggaggaccacaagcggctcaggaaccttgctctggccctggtcacctccacgaagctcaagccaagctaccttggcgacattgagaggattgcgctgcacatagtcggatcatggcatggcaagggcggcaacatcaccttctgcgaggaggcaagaaagtttgcattcagtgtgatagtgaagcaggtgctggggctgtcaccggaggagcctgtcactgccatgatactggaggacttcctcaccttcatgaagggcctcatctctttccctctccgcatcccagggaccccatacgccaaagctgtccaggccagagagaggatatcaagcactgtgaagggcattatcgaggagaggaggaaggctgactgctgcaagagggatgatttcctcaacgtgctcctgtcaaccgatgaactctctgacgaggagaaagttagttttgtgctggactccctgctaggaggatatgagaccacctcactcatgatctccatggtcgtctacttccttgggcagtcagctcaagatctggacctggtgaagagggagcatcaaggcataagatctaccaaagcaaaggaggagtgcttgagctccgaggactacaagaagatggaatatacccaacatgttatcaatgaggcgctgagatgtggaaacattgtcaagtttgtccacaggaaggccctcaaagatgtcagatacaaagagtatctgattccatctggctggaaggtcctacctgttttcagtgctgttcatttgaacccctcgcttcatggaaatgcccaacagtttcagccttgcagatgggaggt

SEQ ID NO: 146 - DNA, 1191 bp, synthetic construct
  source 1..1191: mol_type = other DNA; note = Dwarf11 coding sequence - AET2Gv20748100.3
ggcgatcttgtgctggctgctccggcgatcctgctcgccttgctcctgactctggtgctgagccacttcctgcctttgctcctcaaccccaaggctccgaggggcagctttggatggccccttgttggcgagaccctcaggttcctcacccctcacgcctccaacacgctgggtagcttcctggaggatcactgctccaggtacgggagggtgttcaagtcccatctgttctgcacccccaccgtagtgtcctgtgaccaggagctgaaccacttcatcctgcagaatgaggagaggctgttccagtgcagctaccccaggccaattcatggcatactgggcaagtcctccatgctggtggtcctgggggaggaccacaagcggctcaggaaccttgctctggccctggtcacctccacgaagctcaagccaagctaccttggcgacattgagaggattgcgctgcacatagtcggatcatggcatggcaagggcggcaacatcaccttctgcgaggaggcaagaaagtttgcattcagtgtgatagtgaagcaggtgctggggctgtcaccggaggagcctgtcactgccatgatactggaggacttcctcaccttcatgaagggcctcatctctttccctctccgcatcccagggaccccatacgccaaagctgtccaggccagagagaggatatcaagcactgtgaagggcattatcgaggagaggaggaaggctgactgctgcaagagggatgatttcctcaacgtgctcctgtcaaccgatgaactctctgacgaggagaaagttagttttgtgctggactccctgctaggaggatatgagaccacctcactcatgatctccatggtcgtctacttccttgggcagtcagctcaagatctggacctggtgaagagggagcatcaaggcataagatctaccaaagcaaaggaggagtgcttgagctccgaggactacaagaagatggaatatacccaacatgttatcaatgaggcgctgagatgtggaaacattgtcaagtttgtccacaggaaggccctcaaagatgtcagatacaaagagtatctgattccatctggctggaaggtcctacctgttttcagtgctgttcatttgaacccctcgcttcatggaaatgcccaacagtttcagccttgcagatgggag

SEQ ID NO: 147 - protein, 397 aa, synthetic construct
  source 1..397: note = Dwarf11 protein sequence - AET2Gv20748100.3
GDLVLAAPAILLALLLTLVLSHFLPLLLNPKAPRGSFGWPLVGETLRFLTPHASNTLGSFLEDHCSRYGRVFKSHLFCTPTVVSCDQELNHFILQNEERLFQCSYPRPIHGILGKSSMLVVLGEDHKRLRNLALALVTSTKLKPSYLGDIERIALHIVGSWHGKGGNITFCEEARKFAFSVIVKQVLGLSPEEPVTAMILEDFLTFMKGLISFPLRIPGTPYAKAVQARERISSTVKGIIEERRKADCCKRDDFLNVLLSTDELSDEEKVSFVLDSLLGGYETTSLMISMVVYFLGQSAQDLDLVKREHQGIRSTKAKEECLSSEDYKKMEYTQHVINEALRCGNIVKFVHRKALKDVRYKEYLIPSGWKVLPVFSAVHLNPSLHGNAQQFQPCRWE

SEQ ID NO: 148 - DNA, 1454 bp, synthetic construct
  source 1..1454: mol_type = other DNA; note = Dwarf11 cDNA sequence - AET2Gv20748100.6
gtgctggctgctccggcgatcctgctcgccttgctcctgactctggtgctgagccacttcctgcctttgctcctcaaccccaaggctccgaggggcagctttggatggccccttgttggcgagaccctcaggttcctcacccctcacgcctccaacacgctgggtagcttcctggaggatcactgctccaggtacgggagggtgttcaagtcccatctgttctgcacccccaccgtagtgtcctgtgaccaggagctgaaccacttcatcctgcagaatgaggagaggctgttccagtgcagctaccccaggccaattcatggcatactgggcaagtcctccatgctggtggtcctgggggaggaccacaagcggctcaggaaccttgctctggccctggtcacctccacgaagctcaagccaagctaccttggcgacattgagaggattgcgctgcacatagtcggatcatggcatggcaagggcggcaacatcaccttctgcgaggaggcaagaaagtttgcattcagtgtgatagtgaagcaggtgctggggctgtcaccggaggagcctgtcactgccatgatactggaggacttcctcaccttcatgaagggcctcatctctttccctctccgcatcccagggaccccatacgccaaagctgtccaggccagagagaggatatcaagcactgtgaagggcattatcgaggagaggaggaaggctgactgctgcaagagggatgatttcctcaacgtgctcctgtcaaccgatgaactctctgacgaggagaaagttagttttgtgctggactccctgctaggaggatatgagaccacctcactcatgatctccatggtcgtctacttccttgggcagtcagctcaagatctggacctggtgaagagggagcatcaaggcataagatctaccaaagcaaaggaggagtgcttgagctccgaggactacaagaagatggaatatacccaacatgttatcaatgaggcgctgagatgtggaaacattgtcaagtttgtccacaggaaggccctcaaagatgtcagatacaaagagtatctgattccatctggctggaaggtcctacctgttttcagtgctgttcatttgaacccctcgcttcatggaaatgcccaacagtttcagccttgcagatgggagggcccaagccaaggtacaagcaagaagtttacgccgttcggcggtggcaccaggctctgccctggatcagagcttgccaaagtagaggctgctttcttcctccatcaccttgtgctcaatttcaggtaaaagatttgtcctagcctattaagagatacacaggtaactactgacgcagcaagagccacaaatcagagaaacgaagaacctaaatattttgcaaggataaatcaacttaagaatgaaactaaccagaggaaatatgaatagca

SEQ ID NO: 149 - DNA, 1311 bp, synthetic construct
  source 1..1311: mol_type = other DNA; note = Dwarf11 coding sequence - AET2Gv20748100.6
gtgctggctgctccggcgatcctgctcgccttgctcctgactctggtgctgagccacttcctgcctttgctcctcaaccccaaggctccgaggggcagctttggatggccccttgttggcgagaccctcaggttcctcacccctcacgcctccaacacgctgggtagcttcctggaggatcactgctccaggtacgggagggtgttcaagtcccatctgttctgcacccccaccgtagtgtcctgtgaccaggagctgaaccacttcatcctgcagaatgaggagaggctgttccagtgcagctaccccaggccaattcatggcatactgggcaagtcctccatgctggtggtcctgggggaggaccacaagcggctcaggaaccttgctctggccctggtcacctccacgaagctcaagccaagctaccttggcgacattgagaggattgcgctgcacatagtcggatcatggcatggcaagggcggcaacatcaccttctgcgaggaggcaagaaagtttgcattcagtgtgatagtgaagcaggtgctggggctgtcaccggaggagcctgtcactgccatgatactggaggacttcctcaccttcatgaagggcctcatctctttccctctccgcatcccagggaccccatacgccaaagctgtccaggccagagagaggatatcaagcactgtgaagggcattatcgaggagaggaggaaggctgactgctgcaagagggatgatttcctcaacgtgctcctgtcaaccgatgaactctctgacgaggagaaagttagttttgtgctggactccctgctaggaggatatgagaccacctcactcatgatctccatggtcgtctacttccttgggcagtcagctcaagatctggacctggtgaagagggagcatcaaggcataagatctaccaaagcaaaggaggagtgcttgagctccgaggactacaagaagatggaatatacccaacatgttatcaatgaggcgctgagatgtggaaacattgtcaagtttgtccacaggaaggccctcaaagatgtcagatacaaagagtatctgattccatctggctggaaggtcctacctgttttcagtgctgttcatttgaacccctcgcttcatggaaatgcccaacagtttcagccttgcagatgggagggcccaagccaaggtacaagcaagaagtttacgccgttcggcggtggcaccaggctctgccctggatcagagcttgccaaagtagaggctgctttcttcctccatcaccttgtgctcaatttcaggtaa

SEQ ID NO: 150 - protein, 436 aa, synthetic construct
  source 1..436: note = Dwarf11 protein sequence - AET2Gv20748100.6
VLAAPAILLALLLTLVLSHFLPLLLNPKAPRGSFGWPLVGETLRFLTPHASNTLGSFLEDHCSRYGRVFKSHLFCTPTVVSCDQELNHFILQNEERLFQCSYPRPIHGILGKSSMLVVLGEDHKRLRNLALALVTSTKLKPSYLGDIERIALHIVGSWHGKGGNITFCEEARKFAFSVIVKQVLGLSPEEPVTAMILEDFLTFMKGLISFPLRIPGTPYAKAVQARERISSTVKGIIEERRKADCCKRDDFLNVLLSTDELSDEEKVSFVLDSLLGGYETTSLMISMVVYFLGQSAQDLDLVKREHQGIRSTKAKEECLSSEDYKKMEYTQHVINEALRCGNIVKFVHRKALKDVRYKEYLIPSGWKVLPVFSAVHLNPSLHGNAQQFQPCRWEGPSQGTSKKFTPFGGGTRLCPGSELAKVEAAFFLHHLVLNFR

SEQ ID NO: 151 - DNA, 5191 bp, Aegilops tauschii
  source 1..5191: mol_type = genomic DNA; note = Dwarf11 genomic sequence - Aet_v4.0:2D:422816950:422822140:1
tggcactcgatttagttttcagattagcacaaacacaaggtgcagaccttcacagctccgcaccaaagtcctatgcgtgcatgtaacccgatacaatttctctctctacctgcgtgtttgactgcaccttgagcagcagcagcagcctagatgctagcagtactgcaaagggaccatactcctagctagacccagccccttgctgataaaagttattcatacagttcaaatagcatgagtatacatataagtacatgcagccgggtctgcagtaaaaacagagatcaagcaagtagtaaaatatataccggtggtgttttttgagtactaattaaaaaaaggccaaagcaagaaaacaaaaggcaaccttatttttcctttccctcccgctttgcagagatccttcctgcccttgctcccactactatatagcctccccctcaccttccattccagagagagagaagcagagggcgagcaagtgaatgatagctagacagagagacagagaggcaaggcatggcaggctccatgcagcttgtgagatgtaacttctagggtggggcggtggtggtggtgtgtgctagtatgagcatgatggtgggggtgggcgatcttgtgctggctgctccggcgatcctgctcgccttgctcctgactctggtgctgagccacttcctgcctttgctcctcaaccccaaggctccgaggggcagctttggatggccccttgttggcgagaccctcaggttcctcacccctcacgcctccaacacgctgggtagcttcctggaggatcactgctccaggtatttttcttttcttcatcttttttgctatcattcaccacagccacacctcaagatttctcaacgatgcaatcaagcacgtagtattgtttatcatttactcatgtggcagcaaaagatgatgcatgtcgtgcatgttgtcctgactcagcacctttatctttgtgtcttggctccgaggctgtgatatatttgaatttctacaggttttgttcacagaacctatttctgaaaagtttaacctgttgtttcgtgggggagaaaagatggaaagatctcataaggccctctagcaaatgatggcaacttaacaacatatgaaaagattaacattgttgttgatgtgatgatgcaggtacgggagggtgttcaagtcccatctgttctgcacccccaccgtagtgtcctgtgaccaggagctgaaccacttcatcctgcagaatgaggagaggctgttccagtgcagctaccccaggccaattcatggcatactgggcaagtcctccatgctggtggtcctgggggaggaccacaagcggctcaggaaccttgctctggccctggtcacctccacgaagctcaagccaagctaccttggcgacattgagaggattgcgctgcacatagtcggatcatggcatggcaagggcggcaacatcaccttctgcgaggaggcaagaaaggttggtcgccccgtgcatgcactaactacaaccaaagctagctagacatgcatcagtggggacatgatcccgtgaaacttggaggaaaaactctgcacatgttgcctatggctacatcatcatgctgttacttgctgatgcatcatcagattttttttcaaacgctggctttgacttaccagggtcattcttctccgtattttgactctctttttctgactctttttttttcctttggcacagtttgcattcagtgtgatagtgaagcaggtgctggggctgtcaccggaggagcctgtcactgccatgatactggaggacttcctcaccttcatgaagggcctcatctctttccctctccgcatcccagggaccccatacgccaaagctgtccaggtaattcagtaaacaactctggtattttttatgtacttcaccatgcatcaagctcatgaaactctggtatacccatttgtaccaagcttacattgaagatacgtatgtgtatatagattgttctaacagtgaggttcttgggtatgttgatcactcctctcaggccagagagaggatatcaagcactgtgaagggcattatcgaggagaggaggaaggctgactgctgcaagagggatgatttcctcaacgtgctcctgtcaaccgatgaactctctgacgaggagaaagttagttttgtgctggactccctgctaggaggatatgagaccacctcactcatgatctccatggtcgtctacttccttgggcagtcagctcaagatctggacctggtgaaggtacataccatacctgatcaagcttaagccacaggtgattggtggttgtgtgcatgtcacttattatatatgaacatgctgtgcatgcagagggagcatcaaggcataagatctaccaaagcaaaggaggagtgcttgagctccgaggactacaagaagatggaatatacccaacatgtaagtaagatgatgatcattcagtacacgctttaggacatgtagccggttggtaagcagggatcctttttctttctattatcagccattcgcacaaatatgtgaccctccaaaactgatgggagttttttttctgtccatatgcctgcctatatctggaattttgactagagcaaacaacactttgcaagaacagtgcagatggggaagggtctcttaatatgttctgtaataattggaatggttcaatgatacatacatacatgcgtggatgtcctttcaggttatcaatgaggcgctgagatgtggaaacattgtcaagtttgtccacaggaaggccctcaaagatgtcagatacaaaggtaattaaccctgctagtatttgaggctttcctagcagatcccattgtgctcatcacatgataatggatcaggcaaagggggcggttgggcctttattgctgatttgtgagcattgttattcctaaacacctagcttttgatagaagatgctcaaaagcaagtggacctcttcttttgctctgttgcagagtatctgattccatctggctggaaggtcctacctgttttcagtgctgttcatttgaacccctcgcttcatggaaatgcccaacagtttcagccttgcagatgggaggtatgtctgatttccataccatgtgcacgggcatctatatttgtagtcaagtaatgaatacaacttagtttatgcagattagctttaacataatatgcttgtttagggaagcctaactttgacataatatgcttttttgttaaactattttatacaatgaaaaggtgagaacaaatcagaagagcttatctgtagctttgagagaatcttctttaaggttgctctgttaactaattgatgcctttaattagtgagcgtccaactaacccatgccataataattacttgcaactatcctggtatcttcagatgccaagcaggctttggctgagggcctagtgccttctgtacatggtcctaaccatgattcctccctcaaagccagcatccttggctttgcttcttcattttattaactcccttgatgaagctagctcatatgcatgacttgtacaattgattgatgcaacagggcccaagccaaggtacaagcaagaagtttacgccgttcggcggtggcaccaggctctgccctggatcagagcttgccaaagtagaggctgctttcttcctccatcaccttgtgctcaatttcaggtaaaagatttgtcctagcctattaagagatacacaggtaactactgacgcagcaagagccacaaatcagagaaacgaagaacctaaatattttgcaaggataaatcaacttaagaatgaaactaaccagaggaaatatgaatagcatgaccacaggctgatgcagttatcagtctcatactactaattaagatgctgtgcaaacatggcagcatggagtatccaataagtatggcatgcaagttgagtggtactaaatctggtccatagatatctgcagttatcagattgtgacagaagaaaatgcatctccctctactttttttcagagtaaggagataagtgcttactgaatctctatagttactgatcatagtataatttggtgcctgcagatggaaaatcgatggcgatgacattccaatggcatacccgtacgtggagttcccgagaggcctgccgatcgaaatcgagccgatttgctctgaatcttgactgggttcttgcagctgcagacatggtggtgagtgaaaaaagagattgcaagcaatgaagaagcaccgatgactagcttagcttagctagttgctggaatggggtagctgaggaggttgtgatctcctctgtacatggtgtacatatattttgtccattgtgattactcgaggtggttgggtcaccctgttacatcctccactgtctggactattatcctatagaaaaaaatgggctcctggtgtttacatttacttctgaaattcagtatggggagatatgtatgaaccggacctcactgaaacttcgaaacaacgttcctattcttaccaaatagatagaccatgtataagggaacattgacataagcacgccagtgaacagagagtgaagttactgtctaaaactggcattaaccttcagtgatacaaacatgaatcctttagaattcatgtaaactaagtatggggagattcagagggacgtttggacttttggagagaacgaataagtccttcagaattcagttgaaattcccatgctcaaatggagaatgagaggagatcaatgatcagagaatgatatgcagaaaaatagaccatgttttttttttagaaaggaggatgacccccggcctctgcatctgggagatgcatgcggccattttattgattattctcaaggaccttacaaagtagaacaacaatatgcctgaatccgccatcttggcaacatctgccgctactcctatacaaatgatgaaggggtgcaagttaggccacatacccagacctctcacctaagcctaacatctaaagccggaggcccggaccgagccatctgccgggtccggggctcaaaccggtccgacgcactcacatgtgtcgttgccgtcatcttccactggtccatcttcagagcagattgaggtgacaatcttggcaggtcctccgccatcgacgtcaccacgacgcca

SEQ ID NO: 152 - DNA, 1715 bp, synthetic construct
  source 1..1715: mol_type = other DNA; note = Myb80 cDNA sequence - AET2Gv20749000.1
cgccgatcgaaaactcagacgctcacacactcactcagcaagaacgcagcgccggcgacgtaccggcctaccggaaagcggagtctccacgacggaccccgtgcgcgcgcagggcggcccgggaggcggaggcgccgacatgggccggatcccgtgctgcgagaaggacaacgtgaagcgcgggcagtggacgcccgaggaggacaacaagctgctctcctacatcacgcagcacggcacgcgcaactggcgcctcatccccaagaacgccgggctgcagcggtgcgggaagagctgccgcctgcggtggaccaactacctgcggcccgacctcaagcacggcgagttcactgacgccgaggagcagaccatcatcaagctgcactccgtcgtcggcaacaggtggtcggtgatcgcggcccagctgccggggcggacggacaacgacgtcaagaaccactggaacaccaagctcaagaagaagctgtccgggatgggcatcgatcccgtcacgcacaagtccttctcgcacctcatggccgagatcgccaccacgctcgccccgccgcaggtggcgcacctcgccgaggccgccctcgggtgcttcaaggacgagatgctccacctcctcaccaagaagcgccccaccgacttcccctcgcccgccatgcccgacatggcggcgggcgccagcgcgggcatggccatgggctcgggcgcgcacatcgcgccctgcttcgccgcgccgccacaagccgacgacaccatcgagcgcatcaagatgggcctgtcccgcgccatcatgagcgagcccgccgctcccgcggccgacaagccgtggccattgggcgacatgtccgaggggctggccggcatgtacgccgcgttcaaccccgcgcaggcgacggagttccggtacgaagggacggcgtcggggtacgtccttgggggcgacggcgaccagggcacgtcgatgtggagccaccacagcatgtacagcgggagctccggcaccgaggggggcaggccggcattgcaggaaaagggcaacgacagtgtcggcagcagcggcggcgacgaggaggcggaagacggcaaggagggagggaagggagcctccgacatgtcggggctgtttggatccgattgcgtactctgggacttgcccgacgagctgacgaatcacatgtgtgactaaattcacacggcgagcttagctagcatcatcgatgaacgtcagttcgccggagaaaagaaagcctagagccaaacgattttagaagcacataaatttctgacagtgcctgagaagagctagaataaacagggaaactggaaaatggcgtcccttcttcttttttttctgcgtgcagaactgttaagtgtacattgctctgccgctggccatgctattttttgggggtcctgtgcttcagtcaaaacgacttcaattcaaacagatttggtagcatgtcaatgaagctgtctgaccgtaacatgtcaatgttttagtaaaaccgcacaacttttttgaaatgaagctgacgcgctgtaatttaaatatttattcgttggtataattttttttttaaagatctgctgggcaccaatccgtgctacacttttagggctcctttgagttgcttgattctagaaatgtagaaataagaaaacatagacataggatatgaatgcatgcgcaaaacaaatgattg

SEQ ID NO: 153 - DNA, 1197 bp, synthetic construct
  source 1..1197: mol_type = other DNA; note = Myb80 coding sequence - AET2Gv20749000.1
gccgatcgaaaactcagacgctcacacactcactcagcaagaacgcagcgccggcgacgtaccggcctaccggaaagcggagtctccacgacggaccccgtgcgcgcgcagggcggcccgggaggcggaggcgccgacatgggccggatcccgtgctgcgagaaggacaacgtgaagcgcgggcagtggacgcccgaggaggacaacaagctgctctcctacatcacgcagcacggcacgcgcaactggcgcctcatccccaagaacgccgggctgcagcggtgcgggaagagctgccgcctgcggtggaccaactacctgcggcccgacctcaagcacggcgagttcactgacgccgaggagcagaccatcatcaagctgcactccgtcgtcggcaacaggtggtcggtgatcgcggcccagctgccggggcggacggacaacgacgtcaagaaccactggaacaccaagctcaagaagaagctgtccgggatgggcatcgatcccgtcacgcacaagtccttctcgcacctcatggccgagatcgccaccacgctcgccccgccgcaggtggcgcacctcgccgaggccgccctcgggtgcttcaaggacgagatgctccacctcctcaccaagaagcgccccaccgacttcccctcgcccgccatgcccgacatggcggcgggcgccagcgcgggcatggccatgggctcgggcgcgcacatcgcgccctgcttcgccgcgccgccacaagccgacgacaccatcgagcgcatcaagatgggcctgtcccgcgccatcatgagcgagcccgccgctcccgcggccgacaagccgtggccattgggcgacatgtccgaggggctggccggcatgtacgccgcgttcaaccccgcgcaggcgacggagttccggtacgaagggacggcgtcggggtacgtccttgggggcgacggcgaccagggcacgtcgatgtggagccaccacagcatgtacagcgggagctccggcaccgaggggggcaggccggcattgcaggaaaagggcaacgacagtgtcggcagcagcggcggcgacgaggaggcggaagacggcaaggagggagggaagggagcctccgacatgtcggggctgtttggatccgattgcgtactctgggacttgcccgacgagctgacgaatcacatgtgtgactaa

SEQ ID NO: 154 - protein, 398 aa, synthetic construct
  source 1..398: note = Myb80 protein sequence - AET2Gv20749000.1
ADRKLRRSHTHSARTQRRRRTGLPESGVSTTDPVRAQGGPGGGGADMGRIPCCEKDNVKRGQWTPEEDNKLLSYITQHGTRNWRLIPKNAGLQRCGKSCRLRWTNYLRPDLKHGEFTDAEEQTIIKLHSVVGNRWSVIAAQLPGRTDNDVKNHWNTKLKKKLSGMGIDPVTHKSFSHLMAEIATTLAPPQVAHLAEAALGCFKDEMLHLLTKKRPTDFPSPAMPDMAAGASAGMAMGSGAHIAPCFAAPPQADDTIERIKMGLSRAIMSEPAAPAADKPWPLGDMSEGLAGMYAAFNPAQATEFRYEGTASGYVLGGDGDQGTSMWSHHSMYSGSSGTEGGRPALQEKGNDSVGSSGGDEEAEDGKEGGKGASDMSGLFGSDCVLWDLPDELTNHMCD

SEQ ID NO: 155 - DNA, 1534 bp, synthetic construct
  source 1..1534: mol_type = other DNA; note = Myb80 cDNA sequence - AET2Gv20749000.2
cgccgatcgaaaactcagacgctcacacactcactcagcaagaacgcagcgccggcgacgtaccggcctaccggaaagcggagtctccacgacggaccccgtgcgcgcgcagggcggcccgggaggcggaggcgccgacatgggccggatcccgtgctgcgagaaggacaacgtgaagcgcgggcagtggacgcccgaggaggacaacaagctgctctcctacatcacgcagcacggcacgcgcaactggcgcctcatccccaagaacgccgggctgcagcggtgcgggaagagctgccgcctgcggtggaccaactacctgcggcccgacctcaagcacggcgagttcactgacgccgaggagcagaccatcatcaagctgcactccgtcgtcggcaacaggtaccagagatgatccacgtcgtctcgttctgagatagctgcatcgctctggagttttgctgatcaatgcgttggcgttggggtgcaggtggtcggtgatcgcggcccagctgccggggcggacggacaacgacgtcaagaaccactggaacaccaagctcaagaagaagctgtccgggatgggcatcgatcccgtcacgcacaagtccttctcgcacctcatggccgagatcgccaccacgctcgccccgccgcaggtggcgcacctcgccgaggccgccctcgggtgcttcaaggacgagatgctccacctcctcaccaagaagcgccccaccgacttcccctcgcccgccatgcccgacatggcggcgggcgccagcgcgggcatggccatgggctcgggcgcgcacatcgcgccctgcttcgccgcgccgccacaagccgacgacaccatcgagcgcatcaagatgggcctgtcccgcgccatcatgagcgagcccgccgctcccgcggccgacaagccgtggccattgggcgacatgtccgaggggctggccggcatgtacgccgcgttcaaccccgcgcaggcgacggagttccggtacgaagggacggcgtcggggtacgtccttgggggcgacggcgaccagggcacgtcgatgtggagccaccacagcatgtacagcgggagctccggcaccgaggggggcaggccggcattgcaggaaaagggcaacgacagtgtcggcagcagcggcggcgacgaggaggcggaagacggcaaggagggagggaagggagcctccgacatgtcggggctgtttggatccgattgcgtactctgggacttgcccgacgagctgacgaatcacatgtgtgactaaattcacacggcgagcttagctagcatcatcgatgaacgtcagttcgccggagaaaagaaagcctagagccaaacgattttagaagcacataaatttctgacagtgcctgagaagagctagaataaacagggaaactggaaaatggcgtcccttcttcttttttttctgcgtgcagaactgttaagtgtacattgctctgccgctggccatgctattttttgggggtcctgtgcttcagtcaaaacgac

SEQ ID NO: 156 - DNA, 705 bp, synthetic construct
  source 1..705: mol_type = other DNA; note = Myb80 coding sequence - AET2Gv20749000.2
atgggcatcgatcccgtcacgcacaagtccttctcgcacctcatggccgagatcgccaccacgctcgccccgccgcaggtggcgcacctcgccgaggccgccctcgggtgcttcaaggacgagatgctccacctcctcaccaagaagcgccccaccgacttcccctcgcccgccatgcccgacatggcggcgggcgccagcgcgggcatggccatgggctcgggcgcgcacatcgcgccctgcttcgccgcgccgccacaagccgacgacaccatcgagcgcatcaagatgggcctgtcccgcgccatcatgagcgagcccgccgctcccgcggccgacaagccgtggccattgggcgacatgtccgaggggctggccggcatgtacgccgcgttcaaccccgcgcaggcgacggagttccggtacgaagggacggcgtcggggtacgtccttgggggcgacggcgaccagggcacgtcgatgtggagccaccacagcatgtacagcgggagctccggcaccgaggggggcaggccggcattgcaggaaaagggcaacgacagtgtcggcagcagcggcggcgacgaggaggcggaagacggcaaggagggagggaagggagcctccgacatgtcggggctgtttggatccgattgcgtactctgggacttgcccgacgagctgacgaatcacatgtgtgactaa

SEQ ID NO: 157 - protein, 234 aa, synthetic construct
  source 1..234: note = Myb80 protein sequence - AET2Gv20749000.2
MGIDPVTHKSFSHLMAEIATTLAPPQVAHLAEAALGCFKDEMLHLLTKKRPTDFPSPAMPDMAAGASAGMAMGSGAHIAPCFAAPPQADDTIERIKMGLSRAIMSEPAAPAADKPWPLGDMSEGLAGMYAAFNPAQATEFRYEGTASGYVLGGDGDQGTSMWSHHSMYSGSSGTEGGRPALQEKGNDSVGSSGGDEEAEDGKEGGKGASDMSGLFGSDCVLWDLPDELTNHMCD

SEQ ID NO: 158 - DNA, 1055 bp, synthetic construct
  source 1..1055: mol_type = other DNA; note = Myb80 cDNA sequence - AET2Gv20749000.3
atgggccggatcccgtgctgcgagaaggacaacgtgaagcgcgggcagtggacgcccgaggaggacaacaagctgctctcctacatcacgcagcacggcacgcgcaactggcgcctcatccccaagaacgccgggctgcagcggtgcgggaagagctgccgcctgcggtggaccaactacctgcggcccgacctcaagcacggcgagttcactgacgccgaggagcagaccatcatcaagctgcactccgtcgtcgggtgcaggtggtcggtgatcgcggcccagctgccggggcggacggacaacgacgtcaagaaccactggaacaccaagctcaagaagaagctgtccgggatgggcatcgatcccgtcacgcacaagtccttctcgcacctcatggccgagatcgccaccacgctcgccccgccgcaggtggcgcacctcgccgaggccgccctcgggtgcttcaaggacgagatgctccacctcctcaccaagaagcgccccaccgacttcccctcgcccgccatgcccgacatggcggcgggcgccagcgcgggcatggccatgggctcgggcgcgcacatcgcgccctgcttcgccgcgccgccacaagccgacgacaccatcgagcgcatcaagatgggcctgtcccgcgccatcatgagcgagcccgccgctcccgcggccgacaagccgtggccattgggcgacatgtccgaggggctggccggcatgtacgccgcgttcaaccccgcgcaggcgacggagttccggtacgaagggacggcgtcggggtacgtccttgggggcgacggcgaccagggcacgtcgatgtggagccaccacagcatgtacagcgggagctccggcaccgaggggggcaggccggcattgcaggaaaagggcaacgacagtgtcggcagcagcggcggcgacgaggaggcggaagacggcaaggagggagggaagggagcctccgacatgtcggggctgtttggatccgattgcgtactctgggacttgcccgacgagctgacgaatcacatgtgtga

SEQ ID NO: 159 - DNA, 1053 bp, synthetic construct
  source 1..1053: mol_type = other DNA; note = Myb80 coding sequence - AET2Gv20749000.3
atgggccggatcccgtgctgcgagaaggacaacgtgaagcgcgggcagtggacgcccgaggaggacaacaagctgctctcctacatcacgcagcacggcacgcgcaactggcgcctcatccccaagaacgccgggctgcagcggtgcgggaagagctgccgcctgcggtggaccaactacctgcggcccgacctcaagcacggcgagttcactgacgccgaggagcagaccatcatcaagctgcactccgtcgtcgggtgcaggtggtcggtgatcgcggcccagctgccggggcggacggacaacgacgtcaagaaccactggaacaccaagctcaagaagaagctgtccgggatgggcatcgatcccgtcacgcacaagtccttctcgcacctcatggccgagatcgccaccacgctcgccccgccgcaggtggcgcacctcgccgaggccgccctcgggtgcttcaaggacgagatgctccacctcctcaccaagaagcgccccaccgacttcccctcgcccgccatgcccgacatggcggcgggcgccagcgcgggcatggccatgggctcgggcgcgcacatcgcgccctgcttcgccgcgccgccacaagccgacgacaccatcgagcgcatcaagatgggcctgtcccgcgccatcatgagcgagcccgccgctcccgcggccgacaagccgtggccattgggcgacatgtccgaggggctggccggcatgtacgccgcgttcaaccccgcgcaggcgacggagttccggtacgaagggacggcgtcggggtacgtccttgggggcgacggcgaccagggcacgtcgatgtggagccaccacagcatgtacagcgggagctccggcaccgaggggggcaggccggcattgcaggaaaagggcaacgacagtgtcggcagcagcggcggcgacgaggaggcggaagacggcaaggagggagggaagggagcctccgacatgtcggggctgtttggatccgattgcgtactctgggacttgcccgacgagctgacgaatcacatgtgt

SEQ ID NO: 160 - protein, 351 aa, synthetic construct
  source 1..351: note = Myb80 protein sequence - AET2Gv20749000.3
MGRIPCCEKDNVKRGQWTPEEDNKLLSYITQHGTRNWRLIPKNAGLQRCGKSCRLRWTNYLRPDLKHGEFTDAEEQTIIKLHSVVGCRWSVIAAQLPGRTDNDVKNHWNTKLKKKLSGMGIDPVTHKSFSHLMAEIATTLAPPQVAHLAEAALGCFKDEMLHLLTKKRPTDFPSPAMPDMAAGASAGMAMGSGAHIAPCFAAPPQADDTIERIKMGLSRAIMSEPAAPAADKPWPLGDMSEGLAGMYAAFNPAQATEFRYEGTASGYVLGGDGDQGTSMWSHHSMYSGSSGTEGGRPALQEKGNDSVGSSGGDEEAEDGKEGGKGASDMSGLFGSDCVLWDLPDELTNHMC

SEQ ID NO: 161 - DNA, 3097 bp, Aegilops tauschii
  source 1..3097: mol_type = genomic DNA; note = Myb80 genomic sequence - Aet_v4.0:2D:422984632:422987728:-1
taaaaaggaagctcaaaagatttgtcgtattgacagtagcattctccgagcaatagaatgtagcactagattaatcttggaaatatgacttgctcatgtcactgctaattagacgatccattcacctctcaaagtatttttggagagaaaaatctggagtctttgtctctctgaatgaatgtcattgcaattggaattggaattggaattgaccgtagtgctgctttgactcaaaggggtgcggccgtgcgggtaagtacaactctacgcacgcacgcactcggcacgggactttgcactgtcagaaagtacgtctcagcccgtcgacgccgcagcgtgcatcggagcggagcatcgacgagctggcgaaaacgcgacggacgccgtgcttgcttggactgggggttgacccggcgctgcgcgggtgggcaacctgtcccgtcccccgggacgctcacgctttgggcggcgttgaattctttatcccgcccatgcctccttcgcccagcgccccgccccgccccgcccttcccgtgccgccggccgcacgccccgcacctatatatacttcccagcgcgccggcagatgcaagcgccgcacgccgatcgaaaactcagacgctcacacactcactcagcaagaacgcagcgccggcgacgtaccggcctaccggaaagcggagtctccacgacggaccccgtgcgcgcgcagggcggcccgggaggcggaggcgccgacatgggccggatcccgtgctgcgagaaggacaacgtgaagcgcgggcagtggacgcccgaggaggacaacaagctgctctcctacatcacgcagcacggcacgcgcaactggcgcctcatccccaagaacgccggtgagtccccggcgccagcagacgctctggttacgtggaaggaacgtgcgttgctgttgttcgctggcgctgaacgaggttgcacccgtgacagggctgcagcggtgcgggaagagctgccgcctgcggtggaccaactacctgcggcccgacctcaagcacggcgagttcactgacgccgaggagcagaccatcatcaagctgcactccgtcgtcggcaacaggtaccagagatgatccacgtcgtctcgttctgagatagctgcatcgctctggagttttgctgatcaatgcgttggcgttggggtgcaggtggtcggtgatcgcggcccagctgccggggcggacggacaacgacgtcaagaaccactggaacaccaagctcaagaagaagctgtccgggatgggcatcgatcccgtcacgcacaagtccttctcgcacctcatggccgagatcgccaccacgctcgccccgccgcaggtggcgcacctcgccgaggccgccctcgggtgcttcaaggacgagatgctccacctcctcaccaagaagcgccccaccgacttcccctcgcccgccatgcccgacatggcggcgggcgccagcgcgggcatggccatgggctcgggcgcgcacatcgcgccctgcttcgccgcgccgccacaagccgacgacaccatcgagcgcatcaagatgggcctgtcccgcgccatcatgagcgagcccgccgctcccgcggccgacaagccgtggccattgggcgacatgtccgaggggctggccggcatgtacgccgcgttcaaccccgcgcaggcgacggagttccggtacgaagggacggcgtcggggtacgtccttgggggcgacggcgaccagggcacgtcgatgtggagccaccacagcatgtacagcgggagctccggcaccgaggggggcaggccggcattgcaggaaaagggcaacgacagtgtcggcagcagcggcggcgacgaggaggcggaagacggcaaggagggagggaagggagcctccgacatgtcggggctgtttggatccgattgcgtactctgggacttgcccgacgagctgacgaatcacatgtgtgactaaattcacacggcgagcttagctagcatcatcgatgaacgtcagttcgccggagaaaagaaagcctagagccaaacgattttagaagcacataaatttctgacagtgcctgagaagagctagaataaacagggaaactggaaaatggcgtcccttcttcttttttttctgcgtgcagaactgttaagtgtacattgctctgccgctggccatgctattttttgggggtcctgtgcttcagtcaaaacgacttcaattcaaacagatttggtagcatgtcaatgaagctgtctgaccgtaacatgtcaatgttttagtaaaaccgcacaacttttttgaaatgaagctgacgcgctgtaatttaaatatttattcgttggtataattttttttttaaagatctgctgggcaccaatccgtgctacacttttagggctcctttgagttgcttgattctagaaatgtagaaataagaaaacatagacataggatatgaatgcatgcgcaaaacaaatgattggtgaacacggagattgttaaaggtttctattaactgaattggggagccctttttttcttagaatagcacggaaattctgcctttttcgtggggaattttttcgagttgggtgtacgattcacaagaattgaaaaacacaaaaatccaaataaacatggttaaattaaagtcaaaccacacaaaaatgcatgtttagattgttattatgccactaaggatgttagtctcactcgtggataggaatttgaaaaggatgtccaggtggatattagaattgatgtgttttcctttgaaattgagataaaaaaattccttcattttccctttgcatgtttcttttgaaccaaatgcatggatagtactagcgtagaacaaaaaaatcctacgtttttcctccccttctcctttgagcgagagaggcacttttaagatgaacactattgaaaaaggtttatatgtggactcaaatccgtggcgggtgatgtctggcacctcccacaactattttggaaaagttccagcggccggtgggaaaaaacactggccactgctaatggctcgactgtggcgggcacagtttctcacccgccactcctaagt

SEQ ID NO: 162 - DNA, 1434 bp, synthetic construct
  source 1..1434: mol_type = other DNA; note = Dwarf11 cDNA sequence - KQJ83091
atgatgatggttagcgagcttgtgttggctgctccggcgatcctgctctccttgctcctgacgctggtgctgagccacttcctgcctttgctcctgaaccccaaggctcccaggggcagcttcggatggcctcttgttggtgagaccctgaggttcctcacccctcacgcttccaacaccctgggcagcttcctggaggatcactgctccaggtatgggagggtgttcaagtcgcatctgttctgcacccccaccatagtgtcctgtgaccaggagctgaaccacttcatcctgcagaatgaggagaggctgttccagtgcagctaccccaggccaattcatggcatactgggcaagtcctccatgctggtggtcctgggggaggaccacaagaggctcaggaaccttgctctagcactggtcacctccacaaagctcaagcccagctaccttggtgacattgagaagattgctctgcacattgttgggtcatggcatggcaaggacaagggcagcagaatcaccttctgtgaggaggcaagaaagtttgcattcagtgtgatagtgaagcaggtgctggggctgtcaccagaggagccagttactgccatgatactcgaggacttcctcaccttcatgaagggcctcatctctttccctcttcgcatcccaggaaccccttatgccaaagctgttcaggccagagagaggatatcaaggactgtgaagggcattattgaggagaggaggaaggttggctcctgcaagagggatgatttcctcaatgtgctactgtcaaccaatgagctctctgatgaggagaaagtgagctttgtgctggactcccttctaggaggatatgagacaacctcactcctgatctccatggttgtatattatcttgggcagtcagctcaagatctggacctagtgaagagggagcatcaaggcataagatctagcaaagggaaggaggagtgcttgagctctgaggactacaagaagatggaatatacccaacatgttatcaatgaggcgctgagatgtggaaacattgtcaagtttgtccacaggaaggctctcaaagatgtcagatacaaagagtatctgattccatctggctggaaggtcctacctgtttttagtgctgttcatttgaacccctcactccatggaaacgcccaacagtttcagccttgcagatgggagggcggaagccaagggaccataaaaaaatttaccccgttcggcggtggcccccggctctgccccggatcagagcttgccaaagtagaggctgcattcttcctacaccaccttgtgctcaatttcagatggcgtatcgacggcgatgacgttccgatggcatacccgtacgtggagtttccaagaggtctgccgatagaaatcgagccgatttgctccgtatcctga

SEQ ID NO: 163 - protein, 477 aa, synthetic construct
  source 1..477: note = Dwarf11 protein sequence - KQJ83091
MMMVSELVLAAPAILLSLLLTLVLSHFLPLLLNPKAPRGSFGWPLVGETLRFLTPHASNTLGSFLEDHCSRYGRVFKSHLFCTPTIVSCDQELNHFILQNEERLFQCSYPRPIHGILGKSSMLVVLGEDHKRLRNLALALVTSTKLKPSYLGDIEKIALHIVGSWHGKDKGSRITFCEEARKFAFSVIVKQVLGLSPEEPVTAMILEDFLTFMKGLISFPLRIPGTPYAKAVQARERISRTVKGIIEERRKVGSCKRDDFLNVLLSTNELSDEEKVSFVLDSLLGGYETTSLLISMVVYYLGQSAQDLDLVKREHQGIRSSKGKEECLSSEDYKKMEYTQHVINEALRCGNIVKFVHRKALKDVRYKEYLIPSGWKVLPVFSAVHLNPSLHGNAQQFQPCRWEGGSQGTIKKFTPFGGGPRLCPGSELAKVEAAFFLHHLVLNFRWRIDGDDVPMAYPYVEFPRGLPIEIEPICSVS

SEQ ID NO: 164 - DNA, 6280 bp, Brachypodium distachyon
  source 1..6280: mol_type = genomic DNA; note = Dwarf11 genomic sequence - Brachypodium_distachyon_v3.0:5:16687949:16694228:-1
tctgcagttaaaaaatagccatgcaagtacaaagtcaggtcagtttaaaaaaaaaagtcaagcctcacacggtccacgctgagatttgtgagttgagatgtcccctgttgtgaaggtgcacatttcaattcatctcgtgtggtgtagttgacaagtctcttggtactagcagatatcccatctcaacgcgatagtcaatcaaaatatggagtgtaaaattgcactaattcctagttgatggagtagttagtagcagctttgacttccgggctaggacgatgagattgtgcatgcatagttagtagcagctttgacttccgggcatagttcagtgagcgctggcctgcatgaaaaaaacagggcaagaacaggatgataaggaaaacactatccaaacaggttgctgttaccaactgaaaaaagaaacttacgcatgtaatactccatttaattctcagataaaaattacttcatccctttcataattttttgttgaaatattacatgtgtttaaacacttttttaaaaaataaatacattcatttttagtcaaatttgagacacattttcatactacaatcagtacatctttgtgtcgtaccaacttcgtatgcggaagcgtcgcacgcacagtgatttcgtttcgagaaggtgccacaaaagggattgattatgttgtacagaaatcgtacgaaagcagtcttacatcagtaatttccgtggtaaaaatcttcacggcttaattagcaccaaagtcctatggcatgtatgtatgcatgttaccccagcattccacaagtccagtgtttacatttctatctctacctgcgtgtttgactgcacctttgaacaagcaggactgcaggagcagcagcctagatggtgctcctactcaacagggaccatactcctagctagctagtcctccgtagcgcgtagcccttattgataaaagtttctcatacagtgtattaggagtactctacggagtacatacatgcaggagtactctcggttcacttctcagcagttaacacacacagagatcaagcaaagcaacaagtgtataaacagatcctagccgtaccatttagtagaaaacaaggccaaagcaaggaaacaaaaggcaaccttatttttcctttccctctccctttgccaagatccttcctacccttgctcctactactatatagcctcccccctcaccttccattccagggagagaaagaaagaaacagagggtggtgagcaagtgaatgatagcttagacagacagagaggcaaggcaaggcaaggcagtctccatgctgcttgtgagatgaaagcagtagggggtgcctgcaggtgtgtggtgtgagtatgatgatggttagcgagcttgtgttggctgctccggcgatcctgctctccttgctcctgacgctggtgctgagccacttcctgcctttgctcctgaaccccaaggctcccaggggcagcttcggatggcctcttgttggtgagaccctgaggttcctcacccctcacgcttccaacaccctgggcagcttcctggaggatcactgctccaggtaattaaacagccactcggcgcagtaacatttttttttgtgtgcgttaccagtttcggcaccacagctgagaagtgtaaattaatcttctttacacatgcaattaagtagttattgtttaacattatttcatgtgacagcaaaaaggtgatgcatgctgcatgttgtacggtctcagcagctttttgtgtatttttttattcttaactctgaggctgtgacatgaacttgacagtgcaagagtgtatgtgttttgtgtacaacattaacttgttccttaacaagtgcttttttttttgaaaaaagaagaatggtagtagaagagactagctaacactatgaatgatggcaactaacattgttggtgtgatcgatggtcgatgcaggtatgggagggtgttcaagtcgcatctgttctgcacccccaccatagtgtcctgtgaccaggagctgaaccacttcatcctgcagaatgaggagaggctgttccagtgcagctaccccaggccaattcatggcatactgggcaagtcctccatgctggtggtcctgggggaggaccacaagaggctcaggaaccttgctctagcactggtcacctccacaaagctcaagcccagctaccttggtgacattgagaagattgctctgcacattgttgggtcatggcatggcaaggacaagggcagcagaatcaccttctgtgaggaggcaagaaaggttggttaccaagtgtgtgtgtactaactaaaaccagagctagacatcaccctgcaagagggacatgatcccatgaaacatggaaggaaaaactctgcacatgttgcctagctacctacatcatcatgcatgctgttacttgctgatgcatggatattttctcaaggtggctttgactgaccagagtcttgtttttttgtttttgacttttcttgtgtggggcgagcacagtttgcattcagtgtgatagtgaagcaggtgctggggctgtcaccagaggagccagttactgccatgatactcgaggacttcctcaccttcatgaagggcctcatctctttccctcttcgcatcccaggaaccccttatgccaaagctgttcaggtaattaattaaacaactcttcaaaaatagtgattaattgagctgtcaagtttcgaacacttctgtatatcaccatgcatgaagctcataaaactagtaaataaatatttgtactaagttttgcattaaacatgcatatatgcacatggtaatgacactggttctctcgtctggtcataattcctcacaggccagagagaggatatcaaggactgtgaagggcattattgaggagaggaggaaggttggctcctgcaagagggatgatttcctcaatgtgctactgtcaaccaatgagctctctgatgaggagaaagtgagctttgtgctggactcccttctaggaggatatgagacaacctcactcctgatctccatggttgtatattatcttgggcagtcagctcaagatctggacctagtgaaggtatatcattcttctcatggtgaagatacaggccatttggtagttaggtgcatgtcactaattatataaggacatgctatgcatgcagagggagcatcaaggcataagatctagcaaagggaaggaggagtgcttgagctctgaggactacaagaagatggaatatacccaacatgtaagacgatgatcattcggtacatgctttagttaggatatatatatatatatatatatatatagcagagagcctttttctattatcagcaatctacacaaatatgtatccctccaaatttgatgtttttttctccttattctgcccatttgtccatatgcttgcctatatctggaattttgactagagcagagaacactttgcaagaacagtgcaaagggggaaggatcctaatttgtcctgtaataatggggatggtacaatgatatgcatatatggatgtcctttcaggttatcaatgaggcgctgagatgtggaaacattgtcaagtttgtccacaggaaggctctcaaagatgtcagatacaaaggtaattaaccctagaggctttccttgcagatcccattgtgctcatcacatgataatggatcaggcaaaggggatggctgcacctttaatgctgatttgtgagcattgttattcctaaaatacatagcttttgagagaagatgctcaaaagcaagtggcccttttttttgctctgttgcagagtatctgattccatctggctggaaggtcctacctgtttttagtgctgttcatttgaacccctcactccatggaaacgcccaacagtttcagccttgcagatgggaggtatgtctgtttttcatagcatgtgcttacaatctgtatttgtaatgagttaatgaataatgattaccagttaggtcatgcagcttaattattttttagggaagcttaactttgacataatatgctttttataatacaaatgtatacaatgaaaaggtcagagcaccaatcagatgagcttatctggagctttcagagaatcttctttaaagggtgttctctaactaatcgctatctttttttagagagaaaaccaatagctacctttaattagtgagtgtccaactaacccatgtcataattacttgcaactatactgatatcttcagatgccaagcaagccttttgtacatggtcctaaccatgatacctccctcaaagccagcatccttggctttgcttcttatttgcttagcttcattaatgaaactaatcatctgattcatgtgtatgacttatcgaattgattgatggaacagggcggaagccaagggaccataaaaaaatttaccccgttcggcggtggcccccggctctgccccggatcagagcttgccaaagtagaggctgcattcttcctacaccaccttgtgctcaatttcaggtaaaacataagggcacccgattaggaggtactacatagtagtaggtaactacccatgcaatctgaggtagaaatcgaagaaataaagaacatggcaaccaatactgaaaaaatattcaactcaagattgaaactattgcatcgtgaagaaaattagtggacacatgaacaggacgaaaacagattgatgcagttatcactcacacactaatagtagtacatggcaacatggctatatggtatcagacgaccatatactgtgcaaacatggcagcatggagtttctaataagtggagtatgcaagttgagtggtaccaaatcaggtccataaatgtctgcatctttctgaatgtgacagaagacaatgcatttctttttcttttcttcagactaggagagcagcaatgcttactggatctctatatttacagtgttggctgataaccagagttttaaatagcaaactaaccatttagcggcagcccaaaaatatttgctaaagtgagctatagcgcgctatttataagttttagcacctttggtgacgctaaagcatttagcgcataaaatactagagtggcgctataaccgtgctatttaaaagcttgttgataacagtattgcatttcttggaaattttggcgtcctgcagatggcgtatcgacggcgatgacgttccgatggcatacccgtacgtggagtttccaagaggtctgccgatagaaatcgagccgatttgctccgtatcctgagtgcgttcttgcagcttcagccacggtggcgagtgcggaaaagattgcaagaagtgaagaaacgtttactgaggactagctagctagtggctgctggcatgaggcagctgagggggttgtgatctgctctgtaaatggtgtagatatatttggtccatggtgattacttgaggtggttggttcaccctgtaacattctccaccgtctggactactatcttatagaagaagaaaaaatgggttcttgggagttagtacagaggtttgcagtttatttgttctggaactcagtattggtatcgaataaactggacatttctgaaggtcatgtactaaatagactgttagtgggaaagaaaacagagaataattaaccattggtgatataaacatgaatccggttggaatgtacagtaggatactctcaaggacgtttcgagacaacgagtcaagtctaccagagtgcaaatcattccatgctaaaatggagtctggtacggtgtaaaagagagcacaagaagtgatttagaggtttagacggcagcaaggcgtcagtttggtgtccacgactgccatcctgaaattgatcgtctagagtggtgtacaactcttcatattttacgatagaggagaaacgcaagaaaaagaagagcgcaataggggatttatatagaggctgcagtcggtttggtaaaccagtacttactccgttccataatacttatcgaaatattacatgtatctgaacgtttttttcttgttgaaatattacatgtatctaaacgttttttaataataaataattaaaattggtacggatggagcagtagtctaggattgccgtaagattttgttcgtcataaaaatatggcccatgcaggagggagcagtagtctaggattgccataagattttgttcgtcataaaaatatggcccatgcaggtctcgaacctgcgaccttcgcgttattagcacgacgctctaac

SEQ ID NO: 165 - DNA, 1668 bp, synthetic construct
  source 1..1668: mol_type = other DNA
gcccttcccgtgccgccggcgcgcacgtacgtaacgctcacacgcgcgaccccgcacctatttatactttccccagcgcgcgaccgatgcagatacaacgtcaatcgatctcatccacgggcaaatacactcgcaatcgcaagatcgtagcagcaaggccgccctccgacgtacgtacgtacgtaccggaagaagaatcggcggcgacggagggggccgagagcggaggcgccggcatcgacatgggccggatcccgtgctgcgagaaggagagcgtgaagcgcgggcagtggacgcccgaggaggacaacaagctgcgctcccacatcgcgcagaacggcacccgcaactggcgcctcatccccaagaacgccgggctgcagcgctgcggcaagagctgccgcctgcgctggaccaactacctgcgccccgacctcaagcacggcgagttcaccgacgccgaggagcagaccatcatcaagctgcactccgtcgtcggcaacaggtggtcggtgatcgcggcgcagctgccggggcggacggacaacgacgtgaagaaccactggaacaccaagctgaagaagaagctgtcggggatgggcatcgaccccgtcacgcacaagtccttctcgcacctcatggccgagatcgccaccacgctggcgcccccgcaggtggcgcacctcgccgaggccgccctcggctgcttcaaggacgagatgctccacctgctcaccaagaagcgccccaccgacttcccttcccccgcagtgcccgacatgtccgccatggccatgggcgcgccctgcttcccagcgcagccgcagcagcagcaggcccaggacgacaccatcgagcgcatcaagatgggcctgtcccgcgccatcatgagcgagcccgccgcggccgccgaggacgacaagccgtggccgcagccgggggacatgtctgagatgtacgccgcgttcaacaacgccacgccgcacgcgccggagttccggtacgaagggacggccgcagcgccggggtacctcctgggcggcgacggcggcgaccagggcacgtcgatgtggagcagccaccacagcatgtacagcgggagctccggcaccgagggggcctgcaggccggcgttgcaggagaaagggaacgacagcgtcggcagcagcggcggcgacgacgaggcggaggaggactgcaaggagagcggcaaggggggctccgacatatcggggctgtttggctccgactgtgtgctctgggacttgcccgacgagctgacgaatcacatggtgtgaatgaaatccgcacgccggagcacatgatcggcgaagagcagtttgccgaagaaaataaatggttgagccgaaaaacattctaatatatacgtaggagtacaagatttctgagactgagaagtcagaataaacagagcattggaagatcgtgtacattttatttttggaatgcagaacagttgagtgcgggttgctcttccggagggcggagggcatgatttttcttggccctctcatttggtcaaatcgacttcaattgaggcagaattttgagttctctgattcaatcaggttgtctgaatgttgttgtcaatgtgtcaataaatgacacaaactttttaaaaagagtagatgtcaagaaactataatg

SEQ ID NO: 166 - DNA, 1212 bp, synthetic construct
  source 1..1212: mol_type = other DNA
atgcagatacaacgtcaatcgatctcatccacgggcaaatacactcgcaatcgcaagatcgtagcagcaaggccgccctccgacgtacgtacgtacgtaccggaagaagaatcggcggcgacggagggggccgagagcggaggcgccggcatcgacatgggccggatcccgtgctgcgagaaggagagcgtgaagcgcgggcagtggacgcccgaggaggacaacaagctgcgctcccacatcgcgcagaacggcacccgcaactggcgcctcatccccaagaacgccgggctgcagcgctgcggcaagagctgccgcctgcgctggaccaactacctgcgccccgacctcaagcacggcgagttcaccgacgccgaggagcagaccatcatcaagctgcactccgtcgtcggcaacaggtggtcggtgatcgcggcgcagctgccggggcggacggacaacgacgtgaagaaccactggaacaccaagctgaagaagaagctgtcggggatgggcatcgaccccgtcacgcacaagtccttctcgcacctcatggccgagatcgccaccacgctggcgcccccgcaggtggcgcacctcgccgaggccgccctcggctgcttcaaggacgagatgctccacctgctcaccaagaagcgccccaccgacttcccttcccccgcagtgcccgacatgtccgccatggccatgggcgcgccctgcttcccagcgcagccgcagcagcagcaggcccaggacgacaccatcgagcgcatcaagatgggcctgtcccgcgccatcatgagcgagcccgccgcggccgccgaggacgacaagccgtggccgcagccgggggacatgtctgagatgtacgccgcgttcaacaacgccacgccgcacgcgccggagttccggtacgaagggacggccgcagcgccggggtacctcctgggcggcgacggcggcgaccagggcacgtcgatgtggagcagccaccacagcatgtacagcgggagctccggcaccgagggggcctgcaggccggcgttgcaggagaaagggaacgacagcgtcggcagcagcggcggcgacgacgaggcggaggaggactgcaaggagagcggcaaggggggctccgacatatcggggctgtttggctccgactgtgtgctctgggacttgcccgacgagctgacgaatcacatggtgtga

SEQ ID NO: 167 - protein, 403 aa, synthetic construct
MQIQRQSISSTGKYTRNRKIVAARPPSDVRTYVPEEESAATEGAESGGAGIDMGRIPCCEKESVKRGQWTPEEDNKLRSHIAQNGTRNWRLIPKNAGLQRCGKSCRLRWTNYLRPDLKHGEFTDAEEQTIIKLHSVVGNRWSVIAAQLPGRTDNDVKNHWNTKLKKKLSGMGIDPVTHKSFSHLMAEIATTLAPPQVAHLAEAALGCFKDEMLHLLTKKRPTDFPSPAVPDMSAMAMGAPCFPAQPQQQQAQDDTIERIKMGLSRAIMSEPAAAAEDDKPWPQPGDMSEMYAAFNNATPHAPEFRYEGTAAAPGYLLGGDGGDQGTSMWSSHHSMYSGSSGTEGACRPALQEKGNDSVGSSGGDDEAEEDCKESGKGGSDISGLFGSDCVLWDLPDELTNHMV

SEQ ID NO: 168 - DNA, 2974 bp, Brachypodium distachyon
  source 1..2974: mol_type = genomic DNA; note = Myb80 genomic sequence - Brachypodium_distachyon_v3.0:5:16741184:16744157:-1
cagcctcatctcaagagtgtaatccaagtgcaagcacatagaaatgtcgccggactccccgtgcagtaaagatcctagtaaaatacctatgtccaggatagtttatcgtttggtcctcttgggtcgaacacttggaatactccctgataaacttcctccgtaagacggaccatacaaatgttaagacagaagggtcgtaaaacgtctgtattgaaagctcaagctcagaattatactactgacagaactagaaaatctagttaattactcatacatctctctgtgtttcctgaactgaattgaccgtcctgctttgactggacgaggcaaagctagctctaggcgcgcacgcattccgcagttccgcacggcagtttgcactcgacgccgtgcgccgcgtcggatcatggcggcacgagcaggggcatcgacgagatggcgaaaaacgcgacggacgccgggtgggggcttggaccaggggttgacccggcgctgtacgggtgggcaacctgtcccgtccccccggggttgctcacgcgttgggcgggcgttgaattctttaccccgcccatgcctccttcgcccagcggcccccgtcccgcccttcccgtgccgccggcgcgcacgtacgtaacgctcacacgcgcgaccccgcacctatttatactttccccagcgcgcgaccgatgcagatacaacgtcaatcgatctcatccacgggcaaatacactcgcaatcgcaagatcgtagcagcaaggccgccctccgacgtacgtacgtacgtaccggaagaagaatcggcggcgacggagggggccgagagcggaggcgccggcatcgacatgggccggatcccgtgctgcgagaaggagagcgtgaagcgcgggcagtggacgcccgaggaggacaacaagctgcgctcccacatcgcgcagaacggcacccgcaactggcgcctcatccccaagaacgccgggctgcagcgctgcggcaagagctgccgcctgcgctggaccaactacctgcgccccgacctcaagcacggcgagttcaccgacgccgaggagcagaccatcatcaagctgcactccgtcgtcggcaacaggtgctactgctatgctctgctctgctgaatcatcattccttcctcgtttgagctgcatttttttttctgtaagagattgttgttgatggatgtgtgtcgcgtgcaggtggtcggtgatcgcggcgcagctgccggggcggacggacaacgacgtgaagaaccactggaacaccaagctgaagaagaagctgtcggggatgggcatcgaccccgtcacgcacaagtccttctcgcacctcatggccgagatcgccaccacgctggcgcccccgcaggtggcgcacctcgccgaggccgccctcggctgcttcaaggacgagatgctccacctgctcaccaagaagcgccccaccgacttcccttcccccgcagtgcccgacatgtccgccatggccatgggcgcgccctgcttcccagcgcagccgcagcagcagcaggcccaggacgacaccatcgagcgcatcaagatgggcctgtcccgcgccatcatgagcgagcccgccgcggccgccgaggacgacaagccgtggccgcagccgggggacatgtctgagatgtacgccgcgttcaacaacgccacgccgcacgcgccggagttccggtacgaagggacggccgcagcgccggggtacctcctgggcggcgacggcggcgaccagggcacgtcgatgtggagcagccaccacagcatgtacagcgggagctccggcaccgagggggcctgcaggccggcgttgcaggagaaagggaacgacagcgtcggcagcagcggcggcgacgacgaggcggaggaggactgcaaggagagcggcaaggggggctccgacatatcggggctgtttggctccgactgtgtgctctgggacttgcccgacgagctgacgaatcacatggtgtgaatgaaatccgcacgccggagcacatgatcggcgaagagcagtttgccgaagaaaataaatggttgagccgaaaaacattctaatatatacgtaggagtacaagatttctgagactgagaagtcagaataaacagagcattggaagatcgtgtacattttatttttggaatgcagaacagttgagtgcgggttgctcttccggagggcggagggcatgatttttcttggccctctcatttggtcaaatcgacttcaattgaggcagaattttgagttctctgattcaatcaggttgtctgaatgttgttgtcaatgtgtcaataaatgacacaaactttttaaaaagagtagatgtcaagaaactataatgttgcattcttgaaaagaaactataatattttttcatttcttttgatgaaacagttgcaacagctatttattgcaagagcgttggagtacataaattatatgttgttctttgcgaagctagcacggtggcccgcgcgaaatgcgcgggctagacctgatgataatttttgatatgttcatgatgtttttttttatacctcctttgatttcctgtcatactgtatactcccccgcctggatttataaggcaagcacgggttttatgcggaagtttggtgaaacattactctagtaagacgacgttattgcgacataaaagagatatcattgcatttggattaaaaaactctaccaatgtataacgttatccatacattattatttttataattgttcgtcaaaattcagcacaaaatttaatgcaggtcttataaattcaccgatattggattttgtccaatacgtatctattcgttgtattccctccgtccaacaaaggatgtctcaactttgactaaatttgaatggatctatatactaagtcatgtctagatatatccaaattttgacaaacttgagacatcttttgttggacagaggg

SEQ ID NO: 169 - DNA, 1431 bp, synthetic construct
  source 1..1431: mol_type = other DNA; note = Dwarf11 cDNA sequence
atgagcatgacggtgggcgatcttgtgctggccgctccggcgatcctgctcgccttgctcctggctctggtgctgagccacttcctgcctttgctcctcaaccccaaggctccgaggggcagctttggatggccccttgttggtgagaccctcaggttcctcacccctcacgcttccaacacgctgggtagcttcctggaggatcactgctccaggtatgggagggtgttcaagtcccatctgttctgcacccccaccgtggtgtcctgtgaccaggagctgaaccacttcatcctgcagaatgaggagaggctgttccagtgcagctaccccaggccaattcatggcatactgggcaagtcctccatgctggtggtcctgggggaggaccacaagaggctcaggaaccttgctctggccctggtcacctccacaaagctcaagccaagctaccttggcgacattgagaggattgcgctgcatatagttggatcatggcatggcaagggcagcaacatcaccttctgcgaggaggcaagaaagtttgcattcagtgtgatagtgaagcaggtgctggggctgtcaccagaggagccagtcactgccatgatactggaggacttcctcaccttcatgaagggcctcatctcttttcctctccgcatcccagggaccccctatgccaaagctgtccaggccagagagaggatatcaagcactgtgaagggcattattgaggagaggaggaaggctgactgctgcaagagggatgatttcctcaacgtgctcctgtcaaccgatgaactctctgacgaggagaaagtgagttttgtgctggactccctgctgggaggatatgagaccacctcgctcatgatctccatggtcgtctacttccttgggcagtcagctcaagatctggacctagtgaagagggagcatcaaggcataagatctaccaaagcgaaggaggagtgcttgagctctgaggactacaagaagatggaatatacccaacatgttatcaatgaggcgctgagatgtggaaacattgtcaagtttgtccacaggaaggccctcaaagatgtcagatacaaagagtatctgattccatctggctggaaagtcctacctgtttttagtgctgttcatctgaacccctcacttcatggaaatgcccaacagtttcagccttgcagatgggagggcccaagccaaggtacaagcaagaagtttacgcccttcggcggtggcaccaggctctgccctggatcagagcttgccaaagtagaggctgctttcttcctccatcaccttgtgctgaatttcagatggaaaatagatggcgatgacattccaatggcatacccgtacgtggagttcccgagaggcctgccgatcgaaatcgagccaatttgctctgaatcttga

SEQ ID NO: 170 - protein, 476 aa, synthetic construct
  source 1..476: note = Dwarf11 protein sequence
MSMTVGDLVLAAPAILLALLLALVLSHFLPLLLNPKAPRGSFGWPLVGETLRFLTPHASNTLGSFLEDHCSRYGRVFKSHLFCTPTVVSCDQELNHFILQNEERLFQCSYPRPIHGILGKSSMLVVLGEDHKRLRNLALALVTSTKLKPSYLGDIERIALHIVGSWHGKGSNITFCEEARKFAFSVIVKQVLGLSPEEPVTAMILEDFLTFMKGLISFPLRIPGTPYAKAVQARERISSTVKGIIEERRKADCCKRDDFLNVLLSTDELSDEEKVSFVLDSLLGGYETTSLMISMVVYFLGQSAQDLDLVKREHQGIRSTKAKEECLSSEDYKKMEYTQHVINEALRCGNIVKFVHRKALKDVRYKEYLIPSGWKVLPVFSAVHLNPSLHGNAQQFQPCRWEGPSQGTSKKFTPFGGGTRLCPGSELAKVEAAFFLHHLVLNFRWKIDGDDIPMAYPYVEFPRGLPIEIEPICSES

SEQ ID NO: 171 - DNA, 5518 bp, Hordeum vulgare
  source 1..5518: mol_type = genomic DNA; note = Dwarf11 genomic sequence - HOVUSG0946300_genomic_scaffold67:5620836-5626353
tattcttgttaataatttgaacagcatattatttgtcgaatttaatttagaaaatgtaatatttaaaaaaattaacccaaaactggcactcgatctggttttcatattactacaagttattaccatttcagaaacaaggcgcagaccttcacagctcagcaccaaagtcgtatgcgtgcatgtaacccgatacattttctctctctacctgcgtgtttgactgcaccttgagcagcagcagcctagatgctagtagtagtactgcaaagggaccatgctcctagctagaccctgccccagccccagccccagccccttgttgataaaagttattcatacagttcaaacagtggtaagagtatacatacacatataagtacacgcagcagtaaaaaaaaacggagatgaagcaagtaaatttgctgctagtacaagtggtgtttttgagtacctactacagtacgtaattaaaaaaaaggccaaggcatgaaaacaaaaggcaaccttatttttcctttccctcccgctttgcaaagatccttcctgcccttgctcccgctactatatagcctccccctcgccttccattccagagagagagaaagaagcagagcgcgagcgagcgagtgaatgatagctagacagacagacagacagacagagaggcaaggcatggcaggctccatgcagcttcagcttgtgagatgtaaccagtagggtggtgcggcggtggtgtgtggtgtgtggtgtgtggtagcatgagcatgacggtgggcgatcttgtgctggccgctccggcgatcctgctcgccttgctcctggctctggtgctgagccacttcctgcctttgctcctcaaccccaaggctccgaggggcagctttggatggccccttgttggtgagaccctcaggttcctcacccctcacgcttccaacacgctgggtagcttcctggaggatcactgctccaggtatttctttttttcttcttcttattttttgctatggttcaccacagccacaccacacctcaagatttctcaacgatgcaatcgagcgcgtaggattgtttatcatttattcatgtggcagcgaaagatgatgcatgtcgtgcatgttgtcctgagtcagcagctttatctttgtttctttctttgctccgagaggctgcgatatatttgaatttcacggtgtgctgcacaggttccgtgcgcaaacttatttctgaaaagttttatttattgttttgtgggaggaaaaaaaatggaaagatctcataagactctctaacaaatgatggcagctaacattgttacccttgaaagatcaaaagagactaacattgttggtgtgacgatgcaggtatgggagggtgttcaagtcccatctgttctgcacccccaccgtggtgtcctgtgaccaggagctgaaccacttcatcctgcagaatgaggagaggctgttccagtgcagctaccccaggccaattcatggcatactgggcaagtcctccatgctggtggtcctgggggaggaccacaagaggctcaggaaccttgctctggccctggtcacctccacaaagctcaagccaagctaccttggcgacattgagaggattgcgctgcatatagttggatcatggcatggcaagggcagcaacatcaccttctgcgaggaggcaagaaaggttggttacccagtgcatgcacttactacaaccaaagctagctaggcatgcatcagtggggacatgatcccgtgaaacatggaggaaaaactctgcacatgttacctatagctacatcatcatgcagttactcgctgatgcatgcatgggtatttttcaaacgctggctttgacttaccagggtcttgttttgacttcttttttttttcttcctttgggcgcagtttgcattcagtgtgatagtgaagcaggtgctggggctgtcaccagaggagccagtcactgccatgatactggaggacttcctcaccttcatgaagggcctcatctcttttcctctccgcatcccagggaccccctatgccaaagctgtccaggtaattgagtaaactgtcaaagttttcagcactttttttatctacttcaccatgcatcaagctctcatggaactctggtatacccattcgtaccaagtttacatttaagtgtacatagtgttctaacttctaacactgactgaggttcttgggtatgttgatcattcctcacaggccagagagaggatatcaagcactgtgaagggcattattgaggagaggaggaaggctgactgctgcaagagggatgatttcctcaacgtgctcctgtcaaccgatgaactctctgacgaggagaaagtgagttttgtgctggactccctgctgggaggatatgagaccacctcgctcatgatctccatggtcgtctacttccttgggcagtcagctcaagatctggacctagtgaaggtacatacatacatacatgatcaagcttgagccacaggtgattggtggttgcgtgcatgcatgtactcctatgtcacttattatatatgaacatgctgtgcatgcagagggagcatcaaggcataagatctaccaaagcgaaggaggagtgcttgagctctgaggactacaagaagatggaatatacccaacatgtaagtaagatgtatgatctttcagtacatgctttaggatatgtagctgcagtggttggtaagaagggggcctttttcttctttctattatcatccatccagttccacacaaatatgtgacccgccaaaactgatcttctttttttctgtccatatgcctgcctatatctagaattttgcctagagcaaacaacactttgcaagaacagtgcaaatggggaaggaagggtcttaatatgttctgtaataattggaatggttcaatgatacatacatgcgtggatgtcctttcaggttatcaatgaggcgctgagatgtggaaacattgtcaagtttgtccacaggaaggccctcaaagatgtcagatacaaaggtaattaaccctgctagtacttggggctttcccagcagatcccattgtgctcatcacatgataatggatcaggcaaagggggcggttgggcctttattgctgatttgtgagcattgttattcctaaacacctagcttttgatagaagatgctcaaaagcaagtggacctcttcttttgctctgttgcagagtatctgattccatctggctggaaagtcctacctgtttttagtgctgttcatctgaacccctcacttcatggaaatgcccaacagtttcagccttgcagatgggaggtatgtcccattttcatagcatgtgcatgggcatctatatttgtagtcaagtaatgaatacatcttagtttatgcagattagctttaacataatatacttgtttagggaagcttaactttgacataattatgcttttttataaaactattttatgcaatgcaaaggtgagaacaaatcagaagagcttatctgtagctttgagagaatcttctttaaggttgctctcttaactaattgatgcctttaattggtgagtgtccaactaacccatgccataataattacttgcaactatcctggtatcttcagatgccaagcaggctttggctgagggcctagtgccttctgtacatggtcctaaccatgattcctccctcaaagccagcatccttggctttgcttcctcattttattaactcccttgatgaagctagttcatacgcatgacttgtataattgattgatgcaacagggcccaagccaaggtacaagcaagaagtttacgcccttcggcggtggcaccaggctctgccctggatcagagcttgccaaagtagaggctgctttcttcctccatcaccttgtgctgaatttcaggtaaaacatttgtcctagccgattaagagatatacaggtcactactgacgcagcaagagcaacaaatcaatttaagaatgaaattaaccagaggaaatatgaatagcatgacagcagattgatacagttatcaatctcatactagtggagatactgtgcaaacatggcagcatggtgtttccaataagtatggcatgcaagttgagtggtaccaaatctggtccatagatatctgcagttatcagattgtgacagaagaaaatgcatttccttctctatttttttttcttcagagtagagagataagtgcttactgaatctctctgtatagttgctgatccttgtataatttggcgccctgcagatggaaaatagatggcgatgacattccaatggcatacccgtacgtggagttcccgagaggcctgccgatcgaaatcgagccaatttgctctgaatcttgactgggttcttggagctgcagacatggtggcgagtgaaaaaaaaagagattgcaagcagtgaagtgaagaagcactgatgagtagctagcatagctagttgctggaatggggtagctgaggaggttgtgatctcctctgtacatggtgtacatatattttgtccattgtgattacttgaggtggttgggtcaccctgttacgtcctccactgtttggactaccaccctatagagaaaaaatgggctcctggggtttacatttacttgttctgaaactcagtaggggggacatatgtatgagccgcacctcattgaaacttcgaaacaacgttcctatccttgccaaacagaccatgtaagtctcaaaaaataaagaccatgtaagagaaaattggcataagcacaccagtcagtagagaatgaagttactgtataaaactggcattaaccgctattgataaaaaacatggaatcctgtttgtgcatgattgtatgaatgacttttggagagaacgaatcaagtccttccgaattcaattcaaattccgatgctcaaatggagaatgagaggtgatcaataaaaaacatctcgcaatcttattgttaggctatctctccaaaatagatcgcataacttcctctcccaacgtgggccgatccgccggctcctctcccctgccgctccggagatgtcggaagggtttcgaagccccgactccctgtctggtgttgttaggtttaggatttgtatttcgggtgatgatgttcggtcggtgctgcgatgtcaataccacaaataacgttttccgggtcaccgcttcgacgtgtccaacgacggcgttgaggaaccacagatttgtatcctggtgacacagtggcgaatcttgaaaaaaaattgaaggaagggtttaatgttaactgtgtgaaaaaatgaattaactctcagtcttctagttcaaataattttaaattttttatgatgaatactactaaattttgtttttcaatttttggagggggggggctcaaacctgttaagcaccccccttagatttgccactgctggtgaggtcttcaagacagtgatgaaggtcttgctacatgtcttgtttct

SEQ ID NO: 172 - DNA, 1059 bp, synthetic construct
  source 1..1059: mol_type = other DNA; note = Myb80 cDNA sequence
atgggccggatcccttgctgcgagaaggacaacgtgaagcgcgggcagtggacgcccgaggaagacaacaagctgctctcctacatcacgcagcacggcacgcgcaactggcgcctcatccccaagaacgccgggctgcagcgctgcgggaagagctgccgcctgcggtggaccaactacctgcggcccgacctcaagcacggcgagttcactgacgccgaggagcagaccatcatcaagctgcactccgtcgtcggcaacaggtggtcggtgatcgcagcccagctgcccggccggacggacaacgacgtcaagaaccactggaacaccaagctcaagaagaagctgtccgggatgggcatcgaccccatcacgcacaagtccttctcccacctcatggccgagatcgccaccacgctcgccccgccgcaggtggcgcacctcgccgaggcagccctggggtgcttcaaggacgagatgctccacctcctcaccaagaagcgccccaccgacttcccctcgcccgccatgcccgacatggcagcgggcgccagcgccggcatggccatgggctcgggcgcgctcatagcgccctgcttcgccgcgccgccacaagccgacgacaccatcgagcgcatcaagatgggcctgtcccgcgccatcatgagcgagcccgccgctcccgcggacgacaagccgtggccatcgggcgatatgtccgaggggctggccggcatgtacgccgcgttcaacccggcgcaggcgacggagttccggtacgaagggacggcgtcggggtacgtccttggtggcgacggcgaccagggcacgtcgatgtggagccaccacagcatgtacagcgggagctccggcaccgaggggggcaggccggcattgcaggaaaagggcaacgacagcgtcggcagcagccgcggcgacgatgaggcggaagacggcaaggatggagggaagggaacctccgacatgtcggggctgtttggatccgattgcgtactctgggacttgcccgacgagctcacgaatcacatgtgtgactaa

SEQ ID NO: 173 - protein, 352 aa, synthetic construct
  source 1..352: note = Myb80 protein sequence
MGRIPCCEKDNVKRGQWTPEEDNKLLSYITQHGTRNWRLIPKNAGLQRCGKSCRLRWTNYLRPDLKHGEFTDAEEQTIIKLHSVVGNRWSVIAAQLPGRTDNDVKNHWNTKLKKKLSGMGIDPITHKSFSHLMAEIATTLAPPQVAHLAEAALGCFKDEMLHLLTKKRPTDFPSPAMPDMAAGASAGMAMGSGALIAPCFAAPPQADDTIERIKMGLSRAIMSEPAAPADDKPWPSGDMSEGLAGMYAAFNPAQATEFRYEGTASGYVLGGDGDQGTSMWSHHSMYSGSSGTEGGRPALQEKGNDSVGSSRGDDEAEDGKDGGKGTSDMSGLFGSDCVLWDLPDELTNHMCD

SEQ ID NO: 174 - DNA, 2455 bp, Hordeum vulgare
  source 1..2455: mol_type = genomic DNA; note = Myb80 genomic sequence - HOVUSG0945200_genomic_scaffold67:4914185-4916639
tttttttttgagcatccgtctctctgaacgaatgaccttggaaatcgcaattgaccgcagtgcctgctttgactgaaatgggtacgggtaagtacaactccacgtacgcacgcactcggcacgggactttggcgtgccagaaagtacatctcagctcgtcgacgccggagcgctctgctctgcatcgacgagctggcgaaaacgcgacggacgccgtggttgcttggactgtgggttgacccggcgctgcgcggatgggcaacctgtcccgtcccccggggcgctcacgcgttgggcgggcgttgaattctttatcccgcccatgcctccttcgcccagcgccccgcccttcccgtgccgccggccgcacgcccacacgaccgcgcgccccgcacctatatatacttcccagcgcgccggcacaagcaaccgccgcacgccgatcggaaactcagacgcgcacacacacacacacccacctcagcaagaaggcggcgccggcgacgtacacgtacctgcctaccggagagcggagtctccacgaacacgacggaccccgtgcgcgcgcagggcggcctgggaggcggcggaggcgccgacatgggccggatcccttgctgcgagaaggacaacgtgaagcgcgggcagtggacgcccgaggaagacaacaagctgctctcctacatcacgcagcacggcacgcgcaactggcgcctcatccccaagaacgccggtgagtccgcggcgccagcagacgctctggttaagtccaaggaacgtgccttgttgttgccgctggcgctgaacgaggttgccgcgcgtgacagggctgcagcgctgcgggaagagctgccgcctgcggtggaccaactacctgcggcccgacctcaagcacggcgagttcactgacgccgaggagcagaccatcatcaagctgcactccgtcgtcggcaacaggtacccccaccatcatccacgccttctcgttcctcgtctgtgttagctccatctctctggcgttttgctgatcaatgcgttggcgttggcgttggcgtgcaggtggtcggtgatcgcagcccagctgcccggccggacggacaacgacgtcaagaaccactggaacaccaagctcaagaagaagctgtccgggatgggcatcgaccccatcacgcacaagtccttctcccacctcatggccgagatcgccaccacgctcgccccgccgcaggtggcgcacctcgccgaggcagccctggggtgcttcaaggacgagatgctccacctcctcaccaagaagcgccccaccgacttcccctcgcccgccatgcccgacatggcagcgggcgccagcgccggcatggccatgggctcgggcgcgctcatagcgccctgcttcgccgcgccgccacaagccgacgacaccatcgagcgcatcaagatgggcctgtcccgcgccatcatgagcgagcccgccgctcccgcggacgacaagccgtggccatcgggcgatatgtccgaggggctggccggcatgtacgccgcgttcaacccggcgcaggcgacggagttccggtacgaagggacggcgtcggggtacgtccttggtggcgacggcgaccagggcacgtcgatgtggagccaccacagcatgtacagcgggagctccggcaccgaggggggcaggccggcattgcaggaaaagggcaacgacagcgtcggcagcagccgcggcgacgatgaggcggaagacggcaaggatggagggaagggaacctccgacatgtcggggctgtttggatccgattgcgtactctgggacttgcccgacgagctcacgaatcacatgtgtgactaagtttacacggccaacttagctagcatgatcgatgaacgtcagttcgccggagaaaagaaagcctagagccaaacgatctagaagcacataaatttctgaccgtgcctgagaagttagaataaacagggaaactggaaaatggcgtaccttctttttttctgcgtacagaactgtgaagtgtacattgctctgccgctggccatgttattttttgggggacctggcttgagtcaaaacgatttcaattcaaacaggtttagttgcatgtcaatgaagctgtcggaccgtaacatgtcaatgttttagtaaaaccacacaacttttctttaaatgaagatgacgcactgtaactcaaatatttatttgcttttctaaacacaatacactcaaaatcgttcacatacacgcaatgatggaccgagaatcggaggtttgagggcgccacagttcaaaatttacattaaacatcatcttaatctcagcaaagagtcccaaaatagcaataatttaaggaggcacctagaattcatctagctatgataaaactatggtctcattcatagatgatgtgagtctatttgctcccattggatctggttg

SEQ ID NO: 175 - DNA, 1602 bp, synthetic construct
  source 1..1602: mol_type = other DNA; note = Dwarf11 cDNA sequence - LPERR04G12330.1
atggtgggaggagagcttgtgctggctgctctggtgatcctgcttgccttgctcctgaccctggtgctgagccatttcctgcctttgctcctgaatcccaaggctcccaagggcagctttgggtggcctctccttggtgagaccctcaggttcctcaggcctcatgctagcaacaccctgggcagcttcctggaggatcactgctccaggtatgggagggtgttcaagtcccatctgttctgcacccccaccatagtgtcctgtgaccaggagctgaaccacttcatccttcagaatgaggagaggctgtttcagtgcagctaccccaggccaattcatggcattctgggcaagtcctccatgttagtggtcctaggagaggaccacaaaaggctcaggaaccttgctctagcactggtcacctccacaaagctcaagcccagctaccttggcgacattgagaagattgcattgaacatagttgggtcatggtatgacatgtgcaaggacaaggggagggtcaatgtcatcgccttctgtgaggaggcaagaaagttcgcattcagtgtaatagtgaagcaggtgctggggttgtcaccggaagagccggtcactgccatgatacttgaggatttcctcgccttcatgaagggtctcatctctttccctctctacattccagggaccccctacgccaaagctgccagagagaggatatcaagcactgtgaagggtattattgaggagagggggaatgctggctccagcaacaagggtgatttccttgatgtgctgctttcaagcaatgagctctctgatgaagagaaagtgagctttgtgctggattccttacttggaggctatgagaccacctcactcttgatctccatggttgtgtatttccttgggcagtcagcccaagatctggaactagtgaagagtgagcacgagggcataagatcaaagaaagagaagggcgagttcttgagttctgaggactataagaagatggaatatacccaacatgttatcaatgaggcattgagatgtggcaacattgtcaagtttgtccacaggaaggctctcaaagatgtcagatacaaagagtatctgattccttctggttggaaggtcctacctgttttcagtgctgttcatttaaaccccttacttcatggaaatgcccaacaatttcagccctgcagatgggagggtgcaaaccaagggacaagcaagaagtttacgccgttcggcggtggcccccggctctgcccaggatcagagcttgccaaagtagaggctgctttcttcctccatcaccttgtgctcaattatagatggagaatcgatggcaatgacattcccatggcatacccgtacgtggagtttcagagaggtctgcccatagaaatcgagccactttgctctgggcagttgcagccacgaaccgaggtcgaggggaactccagttgggttgccgtcgccgccggcccgccccagcgccgccgccggtcttgcctccggcggcatcatgaccgcacaccagcgtcatcgccaccctcctgctcgccggcgtcgtcgctgctcgagctcgccgtgtaa

SEQ ID NO: 176 - DNA, 1602 bp, synthetic construct; identical to SEQ ID NO: 175
  source 1..1602: mol_type = other DNA; note = Dwarf11 coding sequence - LPERR04G12330.1

SEQ ID NO: 177 - protein, 533 aa, synthetic construct
  source 1..533: note = Dwarf11 protein sequence - LPERR04G12330.1
MVGGELVLAALVILLALLLTLVLSHFLPLLLNPKAPKGSFGWPLLGETLRFLRPHASNTLGSFLEDHCSRYGRVFKSHLFCTPTIVSCDQELNHFILQNEERLFQCSYPRPIHGILGKSSMLVVLGEDHKRLRNLALALVTSTKLKPSYLGDIEKIALNIVGSWYDMCKDKGRVNVIAFCEEARKFAFSVIVKQVLGLSPEEPVTAMILEDFLAFMKGLISFPLYIPGTPYAKAARERISSTVKGIIEERGNAGSSNKGDFLDVLLSSNELSDEEKVSFVLDSLLGGYETTSLLISMVVYFLGQSAQDLELVKSEHEGIRSKKEKGEFLSSEDYKKMEYTQHVINEALRCGNIVKFVHRKALKDVRYKEYLIPSGWKVLPVFSAVHLNPLLHGNAQQFQPCRWEGANQGTSKKFTPFGGGPRLCPGSELAKVEAAFFLHHLVLNYRWRIDGNDIPMAYPYVEFQRGLPIEIEPLCSGQLQPRTEVEGNSSWVAVAAGPPQRRRRSCLRRHHDRTPASSPPSCSPASSLLELAV

SEQ ID NO: 178 - DNA, 1590 bp, synthetic construct
  source 1..1590: mol_type = other DNA; note = Dwarf11 cDNA sequence - LPERR04G12330.2
atggtgggaggagagcttgtgctggctgctctggtgatcctgcttgccttgctcctgaccctggtgctgagccatttcctgcctttgctcctgaatcccaaggctcccaagggcagctttgggtggcctctccttggtgagaccctcaggttcctcaggcctcatgctagcaacaccctgggcagcttcctggaggatcactgctccaggtatgggagggtgttcaagtcccatctgttctgcacccccaccatagtgtcctgtgaccaggagctgaaccacttcatccttcagaatgaggagaggctgtttcagtgcagctaccccaggccaattcatggcattctgggcaagtcctccatgttagtggtcctaggagaggaccacaaaaggctcaggaaccttgctctagcactggtcacctccacaaagctcaagcccagctaccttggcgacattgagaagattgcattgaacatagttgggtcatggtatgacatgtgcaaggacaaggggagggtcaatgtcatcgccttctcgcagttcgcattcagtgtaatagtgaagcaggtgctggggttgtcaccggaagagccggtcactgccatgatacttgaggatttcctcgccttcatgaagggtctcatctctttccctctctacattccagggaccccctacgccaaagctgccagagagaggatatcaagcactgtgaagggtattattgaggagagggggaatgctggctccagcaacaagggtgatttccttgatgtgctgctttcaagcaatgagctctctgatgaagagaaagtgagctttgtgctggattccttacttggaggctatgagaccacctcactcttgatctccatggttgtgtatttccttgggcagtcagcccaagatctggaactagtgaagagtgagcacgagggcataagatcaaagaaagagaagggcgagttcttgagttctgaggactataagaagatggaatatacccaacatgttatcaatgaggcattgagatgtggcaacattgtcaagtttgtccacaggaaggctctcaaagatgtcagatacaaagagtatctgattccttctggttggaaggtcctacctgttttcagtgctgttcatttaaaccccttacttcatggaaatgcccaacaatttcagccctgcagatgggagggtgcaaaccaagggacaagcaagaagtttacgccgttcggcggtggcccccggctctgcccaggatcagagcttgccaaagtagaggctgctttcttcctccatcaccttgtgctcaattatagatggagaatcgatggcaatgacattcccatggcatacccgtacgtggagtttcagagaggtctgcccatagaaatcgagccactttgctctgggcagttgcagccacgaaccgaggtcgaggggaactccagttgggttgccgtcgccgccggcccgccccagcgccgccgccggtcttgcctccggcggcatcatgaccgcacaccagcgtcatcgccaccctcctgctcgccggcgtcgtcgctgctcgagctcgccgtgtaa

SEQ ID NO: 179 - DNA, 1590 bp, synthetic construct; identical to SEQ ID NO: 178
  source 1..1590: mol_type = other DNA; note = Dwarf11 coding sequence - LPERR04G12330.2

SEQ ID NO: 180 - protein, 529 aa, synthetic construct
  source 1..529: note = Dwarf11 protein sequence - LPERR04G12330.2
MVGGELVLAALVILLALLLTLVLSHFLPLLLNPKAPKGSFGWPLLGETLRFLRPHASNTLGSFLEDHCSRYGRVFKSHLFCTPTIVSCDQELNHFILQNEERLFQCSYPRPIHGILGKSSMLVVLGEDHKRLRNLALALVTSTKLKPSYLGDIEKIALNIVGSWYDMCKDKGRVNVIAFSQFAFSVIVKQVLGLSPEEPVTAMILEDFLAFMKGLISFPLYIPGTPYAKAARERISSTVKGIIEERGNAGSSNKGDFLDVLLSSNELSDEEKVSFVLDSLLGGYETTSLLISMVVYFLGQSAQDLELVKSEHEGIRSKKEKGEFLSSEDYKKMEYTQHVINEALRCGNIVKFVHRKALKDVRYKEYLIPSGWKVLPVFSAVHLNPLLHGNAQQFQPCRWEGANQGTSKKFTPFGGGPRLCPGSELAKVEAAFFLHHLVLNYRWRIDGNDIPMAYPYVEFQRGLPIEIEPLCSGQLQPRTEVEGNSSWVAVAAGPPQRRRRSCLRRHHDRTPASSPPSCSPASSLLELAV

SEQ ID NO: 181 - DNA, 5905 bp, Leersia perrieri
  source 1..5905: mol_type = genomic DNA; note = Dwarf11 genomic sequence - Lperr_V1.4:4:13356928:13362832:-1
catgagagagcttaattatcaccaatgtcctgtgcatcgatctgcacctggcctctgcatgtccccccaatgcatttctctctctacctgtgtgtttgactgcaccttaagatgcagcagcagcctagatgctagctactctgccttggaccatcctcctagtcctaggctgtaggctcataccctccttgataaaagctactactggcacagtgtatatgcatgcagccaattcacttcactgcacagtaaaaacagagatcaagcaatgaaagaaagaaatactcctacttctactttaaaacaaggccaaagcaaggaaacaaaaggcagcctcattttttttcctggtcatcacaccctttccatcactctccctttgcaaagatccttcctgcctttgcttctactgctatatagcctcccccctcaccttccattcgagagaaaaatagagaagaagaggctgagcaactgaaggcttatataaacatagaatagataggcatagagagcttagctcgtagctgcaaggctccatgcttgtgagatgagatgagcagggggtggtggtggtgcctgcaggcgtgaggtactatgatggtgggaggagagcttgtgctggctgctctggtgatcctgcttgccttgctcctgaccctggtgctgagccatttcctgcctttgctcctgaatcccaaggctcccaagggcagctttgggtggcctctccttggtgagaccctcaggttcctcaggcctcatgctagcaacaccctgggcagcttcctggaggatcactgctccaggtaattaaccatatcagtaacatttttatcaccaccaccatacacagaagcaacaagtgtcatgttaccatgcaattaagtactgtaccattatttcatgtgacagcaaaaggtaatgctgctgtcctgtcccagcagctttatcttaactcttttcttcctcctgggggggatgtaacatgaattggactagtgtaaagagttgtgcaacttttattatgaagtgagaaaatggaatgtaaaggttgcacactaacactatagctcgaatggtagtaacactgatggtgtgatgatgatgatgcaggtatgggagggtgttcaagtcccatctgttctgcacccccaccatagtgtcctgtgaccaggagctgaaccacttcatccttcagaatgaggagaggctgtttcagtgcagctaccccaggccaattcatggcattctgggcaagtcctccatgttagtggtcctaggagaggaccacaaaaggctcaggaaccttgctctagcactggtcacctccacaaagctcaagcccagctaccttggcgacattgagaagattgcattgaacatagttgggtcatggtatgacatgtgcaaggacaaggggagggtcaatgtcatcgccttctgtgaggaggcaagaaaggttagcaagtgtactaacttaaaccagagccatgcacatcactagagggacatgatcccttgaaacaaggagggaaaactttgcacatgttagctacatcatcatgttacttgctgctggatgaatctttgacttaccagggtcttttttccttttcttctctttgtgtgctgtttccttgagaagcgcagttcgcattcagtgtaatagtgaagcaggtgctggggttgtcaccggaagagccggtcactgccatgatacttgaggatttcctcgccttcatgaagggtctcatctctttccctctctacattccagggaccccctacgccaaagctgtccaggcatgcaactcaatatctcgtttacataagtcgtaaaactgtaataaaaatcatatccaacatttttttgtacacttaccacaatagccttttaaaactagtatacagaagcgacgtgctgcaataacacccattcttttgtctggtgatcctcacaggccagagagaggatatcaagcactgtgaagggtattattgaggagagggggaatgctggctccagcaacaagggtgatttccttgatgtgctgctttcaagcaatgagctctctgatgaagagaaagtgagctttgtgctggattccttacttggaggctatgagaccacctcactcttgatctccatggttgtgtatttccttgggcagtcagcccaagatctggaactagtgaaggtatacatggtcttcattctgaaaagacagagcagtactggtaaataagtaattaagtggacatcactaaacatatattaatatgtttgcatgcagagtgagcacgagggcataagatcaaagaaagagaagggcgagttcttgagttctgaggactataagaagatggaatatacccaacatgtaagatgatcatacaatacaaacttttaggtttggttagtatgcctggggtacctttttttcctattatcagcaaccacacaaatatgtgaccctccaaatatgtgatttactcatgttcagacagattctcctatgcctaccaaatgtgcagtttttgaattaatcaagagagagagagaatcttagtacactagagtgaaaagggctgaagggacttgttctccaataatgcaaactttgtgatgatgcattgctatgcccttacaggttatcaatgaggcattgagatgtggcaacattgtcaagtttgtccacaggaaggctctcaaagatgtcagatacaaaggtaattaaccctacttgaggctttcgttgaagattccattgtgctcatcacatgataatggatcaggcaaagtggatggttgcacctttattactgatttttaagcattgttattcctaaaatacctcagcttttcataggagatgctcaaaagcaagtggctcttttttctttgctctgttgcagagtatctgattccttctggttggaaggtcctacctgttttcagtgctgttcatttaaaccccttacttcatggaaatgcccaacaatttcagccctgcagatgggaggtatgtttgtttttcactctctgtagttataaacttctcaatatactgtagcatgtatattattaagggctaattggattattatttattaatgaactaatgataaatgttttggacgagctaggtcatgaaatttagctttgatgtagtatacttttctagaatagaaatttataaaatgaaaagttcagagcacctatcaagagagcttatctggagccttgaaggaatcttctttaaaggatgttctctaactaattgctacctttaattagtgagtgtccaactatgacataattactcgacactattctggtgtcttcagatgccaagcaagctccctgtggctgtaatgccttttgcgcatggccctaaccatgattcctctcattcaaagccagcattcttggctttgctcccttttcttagtttccttcatgaagctaataatctgattcatgtgtgttccttatgtgattgatgcaacagggtgcaaaccaagggacaagcaagaagtttacgccgttcggcggtggcccccggctctgcccaggatcagagcttgccaaagtagaggctgctttcttcctccatcaccttgtgctcaattataggtaaaacaaaagggcatatttgtcctacccgatcgagtagaagatacatggattgaagttgatttgactcaagcagcaatgaaggaaaatacgttcagaaataattatctttacgaaactggtgcctgagtggttcatgcttaaaaaaggataaaaactgtagaggcaaacatgaaccggaaaacaaattgatgcagttgcagatactaataatacgcactacactagtaagtgatggaaagaatgtcattacatcaactaggcaaattatttatgcttttgtctgcaaggaccgcaagtctgaactcagctatcttgtgcattttcataactggcactgtagagcatagcatcagacgacaacacagagaacaaacatgacagcatggagtttccgataggtagctatgcaagttgagttgagggctgccatacaagataaaatataccgtgctatgataaaactataaaaaactaggttcattaccaacaaacaaaaacaaaaggcaggcttaagcaagttatgttgttgtttcagagtacagtcaacgtgtacttactgaatatccatgcgatagagttttctgatcatcgatcttgaatattttgtgccgtgcagatggagaatcgatggcaatgacattcccatggcatacccgtacgtggagtttcagagaggtctgcccatagaaatcgagccactttgctctgggcagttgcagccacggtgagtgagtccatcaattaggtcagcaagcgaggggaatcgagttgaacgcgagaaagaagaggattagtcagtgattgcaagaactgaagaaagaaccgggcaatagctagtagtacctatcatgagtcaacaactgagattgtaatttgctgtacatggtgtagatatattttgtccatgccgattgcttgcggtggtggtgaggggcttcaccctgtaaacatcctccactgtttcaactttcaactgctattctatagaaaaattgggctattggaatgtaggataacttgccatttctgtttcctaaaactcaatgaagctgacatctttaaaatacatcattgaaactttgaaagggtactataatcctcaatatatttttaattacctaaaagtgataaagtatttgaagatggtatgggcataagtcaaatgaacatgaacccgtatggacggtactatctcaaggaattttggaatagacaaattggacatgtatggactataatatctgcaggaattttggaatagacagacaaagttgtagaaaattcctatcaaattgtggaatcggagatgactggtcccgtttggattggactaacaattgaggaatttccgaacggatgctttcctgcaggaaaatcttaggttttgtacgtttggattgaagaaaaaacgaagggtatattccaaaggaaaattcctcatagctggccgattccagccgatttctaggggaaaattaacatccaccgtaacctcatctgcgcagaaccgaggtcgaggggaactccagttgggttgccgtcgccgccggcccgccccagcgccgccgccggtcttgcctccggcggcatcatgaccgcacaccagcgtcatcgccaccctcctgctcgccggcgtcgtcgctgctcgagctcgccgtgtaataaaaatgagcagtggaaagagagagataagatacgagcggtttactgcagaggataagataaaggcataccacaaaggtaaaaaaaaaaccagaaatacagcaaaacgaaatcgatgttatttctagggcacagcgattgtactacgattttttgacaaattgcaaacaaaaaaatgggtgtacgttttttttttggaaaaagctgcaaacaaaaaacggatttaaattgatcaaaggatggcccatgcaggtctcgaacctgcgaccttcgcgttattagcacgacgctctaaccagctgagctaataggccaatttgtcagctagtaactgcaaaattataattaatcagttcagcaatctgaacaaaccttattgagattcacttgcaataggaaagatttgcgcacagcgccaatggtgtattgcaagatagacacctatttacatgacacggaactcattttgcttatggaaaacaccattcgtggcattgcatttatttatgaaaagtcgaaaactacaaccactacagatttacagcaacacctgctaaaatatgatttgaagtgtccacagcacataacaaggatatcaga

SEQ ID NO: 182 - DNA, 1107 bp, synthetic construct
  source 1..1107: mol_type = other DNA; note = Myb80 cDNA sequence - LPERR04G12420.1
atgggcagggtgccgtgctgcgagaaggacaacgtgaagcgcgggcagtggacgcccgaggaggacaacaagctgctgtcgtacatcacccagcacggcacacgcaactggcgcctcatccccaagaacgccggcctgcagcgctgcggcaagagctgccgcctccgctggaccaactacctccgccccgacctcaagcacggcgagttcaccgactccgaggaacacaccattataaagctccattccgtcgtcggcaacaggtggtcggtgatcgcggcgcagttgccggggaggacggacaacgacgtgaagaaccactggaacacgaagctgaagaagaagctgtcggggatggggattgatccgatcacgcacaagtcgttctcgcacctgatggccgagatcgccaccacgctcgcgccgccgcaggtcgcgcacctcgccgaggccgcgctcggctgcttcaaggacgagatgctccacctcctcaccaagaagcgcccctccctcgaattcccctccccttcccccgcctccgccgcgccgattcccgacggcgccatgctcgccgcgccgccgccgccgccgcacgaccacgacaccatcgagcggatcaagctgggactctcccgcgccatcatgagcgacccctccgcctccgcagccgccgccgccgctgctgctaaggcggaggaggacatgtcggaggggctcgccgggatgtacgccgcggcgtacgacgcggatgagttccggtacgacgacgggggagcggcggcggcggcggtggtggcgggctacgacgtcctcggcggcggcggcgaccatggcgcgtcgatgtggagccaccagagcctgtacagcgggagctccggcacggaggaggcaaacaggaggacgaggttgccgccggagaaaggcaacgactgcagcgtcggcagcagcggcggcggcggcggcggcggcggcgatgacggcgatgccgccgacgacggcgggaaggacagcgggaagggaggaggggcatccgacatgtcgggactgttcgcctccgactgcgtgctctgggacttgcccgacgagctcgcgaatcacatggtgtag

SEQ ID NO: 183 - DNA, 1107 bp, synthetic construct; identical to SEQ ID NO: 182
  source 1..1107: mol_type = other DNA; note = Myb80 coding sequence - LPERR04G12420.1

SEQ ID NO: 184 - protein, 368 aa, synthetic construct
  source 1..368: note = Myb80 protein sequence - LPERR04G12420.1
MGRVPCCEKDNVKRGQWTPEEDNKLLSYITQHGTRNWRLIPKNAGLQRCGKSCRLRWTNYLRPDLKHGEFTDSEEHTIIKLHSVVGNRWSVIAAQLPGRTDNDVKNHWNTKLKKKLSGMGIDPITHKSFSHLMAEIATTLAPPQVAHLAEAALGCFKDEMLHLLTKKRPSLEFPSPSPASAAPIPDGAMLAAPPPPPHDHDTIERIKLGLSRAIMSDPSASAAAAAAAAKAEEDMSEGLAGMYAAAYDADEFRYDDGGAAAAAVVAGYDVLGGGGDHGASMWSHQSLYSGSSGTEEANRRTRLPPEKGNDCSVGSSGGGGGGGGDDGDAADDGGKDSGKGGGASDMSGLFASDCVLWDLPDELANHMV

SEQ ID NO: 185 - DNA, 2388 bp, Leersia perrieri
  source 1..2388: mol_type = genomic DNA; note = Myb80 genomic sequence - Lperr_V1.4:4:13405809:13408196:-1
atttacggcgttgtaaatgtcttgcattctgtcgatatatatgtagatgctccttgccaaatactacctttcagaaatcagttttcggtcgaatcgactgtcttgttttgtctgaatcgagactcagccatgcatttggcacaggacaatttacgttgtcagaatgaagtacatcccagccagtcaccgatgccacacgccgcgtcgatctcatctccgggagcggtgtagcgcagtgaagagtgaagtgtgtgcaagagcgtcagtgagcgagaacgcgagcggcgccgggagggagcgtggaccgggggttgacccggcgctgcgcgggtgaacaacctgtcccgccccccggacgagccctcacgcgttgcgcgggcgttgaattctttatcccgcccatgcgcgcacacacaatttacacaaacacacacgcttccttcccccgtgccgtgccggcacacacccgcgggctatttatacactcggcgcctccccgtgtccgcgccgcacgcacgcacggtcgcctcatcaccatcagcagcagcagcggaatctgtggacggcgacgggaggagaccgaccgacctatcgaccgacatgggcagggtgccgtgctgcgagaaggacaacgtgaagcgcgggcagtggacgcccgaggaggacaacaagctgctgtcgtacatcacccagcacggcacacgcaactggcgcctcatccccaagaacgccggcctgcagcgctgcggcaagagctgccgcctccgctggaccaactacctccgccccgacctcaagcacggcgagttcaccgactccgaggaacacaccattataaagctccattccgtcgtcggcaacaggtaaacacaacccaacaacgagtgatttggcctttttttacggtaatgttgtaatactgaaacacgaagctgtgtgtgtaggtggtcggtgatcgcggcgcagttgccggggaggacggacaacgacgtgaagaaccactggaacacgaagctgaagaagaagctgtcggggatggggattgatccgatcacgcacaagtcgttctcgcacctgatggccgagatcgccaccacgctcgcgccgccgcaggtcgcgcacctcgccgaggccgcgctcggctgcttcaaggacgagatgctccacctcctcaccaagaagcgcccctccctcgaattcccctccccttcccccgcctccgccgcgccgattcccgacggcgccatgctcgccgcgccgccgccgccgccgcacgaccacgacaccatcgagcggatcaagctgggactctcccgcgccatcatgagcgacccctccgcctccgcagccgccgccgccgctgctgctaaggcggaggaggacatgtcggaggggctcgccgggatgtacgccgcggcgtacgacgcggatgagttccggtacgacgacgggggagcggcggcggcggcggtggtggcgggctacgacgtcctcggcggcggcggcgaccatggcgcgtcgatgtggagccaccagagcctgtacagcgggagctccggcacggaggaggcaaacaggaggacgaggttgccgccggagaaaggcaacgactgcagcgtcggcagcagcggcggcggcggcggcggcggcggcgatgacggcgatgccgccgacgacggcgggaaggacagcgggaagggaggaggggcatccgacatgtcgggactgttcgcctccgactgcgtgctctgggacttgcccgacgagctcgcgaatcacatggtgtagctgagaaaacgcgcgaaacttcggacgatgaagctgaagcacgccatggatcgatggtcgaagaactgcagcacttgcagttgcaggtttgaaagaattggatagtgcgaaaaaatttgctacaaataatattgctgaaagagtaacagaaaaaaaaaactagagtacatagttactagtacatactagagtaggagtagatatttgtgctttgaaaagattaacaaaagcgaaatgtgaatagtttttcactgattgattgagccggaggccaaggtatttcccagccctctgcttcagtcacaggcgcaatggaaaattcagtgcagttaggacagattgtttagttctttgatggatgaattgtctgatgatgacttgatggggaaaagtaaatttgcatcttaagtacatatattactcatctctagcatgctatctaaatggccatgaaaaattctgaagaaagattcagtaacatagattactggacgcaagaagattgccttttatcttgtaaacttctgaaaatcatgagagttttgaatttaacaataagttccacacttccacagctgcacccaagaaggcaagaaacct

SEQ ID NO: 186 - DNA, 1437 bp, synthetic construct
  source 1..1437: mol_type = other DNA; note = Dwarf11 cDNA sequence - OBART04G15600.1
atggtgggaggagagcttgtgctggctgctctggtgatcctgcttgctttgctcctgaccctggtgctgagccacttcctgcctttgctcctgaatcccaaggctcccaagggaagctttgggtggcctctccttggtgagacgctgaggttcctcagtcctcatgctagcaacaccctgggcagcttcctggaggatcactgctccaggtatgggagggtgtttaagtcccatctgttctgcacccccaccatagtgtcctgtgaccaggagctgaaccacttcatccttcagaatgaggagaggctgtttcagtgcagctaccccaggccaattcatggcattctgggcaagtcctccatgttagtggtcctaggggaggaccacaagaggctcaggaaccttgctctagcactggtcacctccacaaagctcaagcccagctaccttggcgacattgagaagattgcactgcatatagttgggtcatggcatggcaagagcaaggacaaggggatggtcaatgtcatcgccttctgcgaggaggcaagaaagtttgcattcagtgtaatagtgaagcaggtgctggggctatcaccagaggagccggtcactgccatgatacttgaagatttcctcgccttcatgaagggtctcatctctttccctctctacatcccagggacgccctatgccaaagctgccagagcgaggatatcaagcactgtgaagggtattattgaggagaggaggaatgctggctccagcaacaagggtgatttccttgatgtgctgctttcaagcaatgagctctctgatgaggagaaagtgagctttgtgctggattccttactgggaggatatgagaccacctcactcttgatctccatggttgtgtatttccttgggcagtcagctcaagatctggaactagtgaagagggagcatgaaggcataagatcgaagaaagagaaggacgagttcttgagctctgaagactataagaagatggaatatacccaacatgttatcaatgaggcactgagatgtggcaacattgtcaagtttgtccacaggaaggctctcaaagatgtcagatacaaagagtatctgattccttctggttggaaggtcctacctgttttcagtgctgttcatttgaaccccttacttcatggaaatgcccaacaatttcagccctgcagatgggagggtgcaagccaagggacaagcaagaagtttacgccgttcggcggtggcccccggctctgccctggatcagagcttgcaaaagtagaggctgctttcttcctccatcaccttgtgctcaattatagatggagaatcgatggcgatgacattccgatggcatacccgtacgtggagttccagagaggtctgcccatagaaatcgagccactttgctctgaatcctga

SEQ ID NO: 187 - DNA, 1437 bp, synthetic construct; identical to SEQ ID NO: 186
  source 1..1437: mol_type = other DNA; note = Dwarf11 coding sequence - OBART04G15600.1

SEQ ID NO: 188 - protein, 478 aa, synthetic construct
  source 1..478: note = Dwarf11 protein sequence - OBART04G15600.1
MVGGELVLAALVILLALLLTLVLSHFLPLLLNPKAPKGSFGWPLLGETLRFLSPHASNTLGSFLEDHCSRYGRVFKSHLFCTPTIVSCDQELNHFILQNEERLFQCSYPRPIHGILGKSSMLVVLGEDHKRLRNLALALVTSTKLKPSYLGDIEKIALHIVGSWHGKSKDKGMVNVIAFCEEARKFAFSVIVKQVLGLSPEEPVTAMILEDFLAFMKGLISFPLYIPGTPYAKAARARISSTVKGIIEERRNAGSSNKGDFLDVLLSSNELSDEEKVSFVLDSLLGGYETTSLLISMVVYFLGQSAQDLELVKREHEGIRSKKEKDEFLSSEDYKKMEYTQHVINEALRCGNIVKFVHRKALKDVRYKEYLIPSGWKVLPVFSAVHLNPLLHGNAQQFQPCRWEGASQGTSKKFTPFGGGPRLCPGSELAKVEAAFFLHHLVLNYRWRIDGDDIPMAYPYVEFQRGLPIEIEPLCSES

SEQ ID NO: 189 - DNA, 5039 bp, Oryza barthii
  source 1..5039: mol_type = genomic DNA; note = Dwarf11 genomic sequence - O.barthii_v1:4:16843786:16848824:-1
cagcagcagcagcctagatgctagctactctgcattggaccatcctcctagtcctaggctgtaggctcatagccctccttgataaaagctactactggcacagtatatgcatgcagccaattcacttcactgcagtaaaaaaaaaaaaagaaaacagagaaacagagatcaaacaatgcaagaaagaaatacccctacttctactttaaaacaaggccaaagcaaggaaacaaaaggcagcctctattttttttccctcccccccctgctcatcacccctttccatcactccctcccttcgcaaagatccttcctgcctttgcttctactgctatatagcctcccccctcaccttccattccagagaaaaatagagggagggagagggagagaagcagagtgttgaacacaagctagtgaaagggttagatagaaacttggtagaatagacagataggcagagagagagagagagagagagagagcttagcaagctaaggcttagctgctgcaaggctccatccatgcttcttgttgtgagatgagattgagataagatgagcagggggtggtggtgcctggtgtgaggctataggtaagatggtgggaggagagcttgtgctggctgctctggtgatcctgcttgctttgctcctgaccctggtgctgagccacttcctgcctttgctcctgaatcccaaggctcccaagggaagctttgggtggcctctccttggtgagacgctgaggttcctcagtcctcatgctagcaacaccctgggcagcttcctggaggatcactgctccaggtaaattaaaatcatatgcagtaaacatttctatcagtatcaccaccacaaccacacaggagcaacaagtgtcatcttaccatgcaattaagtactgtaccattatttcatgtgacagcaaaaggtaatgctgctgtcctgtcccagcagctttatcacgccctttttcttcctccctgatgaggggggtgctgtaacatgaattggacagtgtttagcatcttgttaaagagttgtgcaaaccttttcttccgatgaacaagcgagagaaaaggaatgtaaaggttgcacaacacttaactagctagcatgcatggtggtagtaacactgatgatggtgtgatgatgatgatgatgcaggtatgggagggtgtttaagtcccatctgttctgcacccccaccatagtgtcctgtgaccaggagctgaaccacttcatccttcagaatgaggagaggctgtttcagtgcagctaccccaggccaattcatggcattctgggcaagtcctccatgttagtggtcctaggggaggaccacaagaggctcaggaaccttgctctagcactggtcacctccacaaagctcaagcccagctaccttggcgacattgagaagattgcactgcatatagttgggtcatggcatggcaagagcaaggacaaggggatggtcaatgtcatcgccttctgcgaggaggcaagaaaggttagcaagtgtactaacttgaaaccagagccatatcaccacaaggacatgatcccttgaaacaagggagggaaaactttgcacatgttagctacataccatcatcatcatgttgttacttgctgctgcatgaatctttgtcccaaggtcactttgacttaccatggtcttttttaccttttcttttttttttctctctctggtgtgctctctttccttgagaaccacagtttgcattcagtgtaatagtgaagcaggtgctggggctatcaccagaggagccggtcactgccatgatacttgaagatttcctcgccttcatgaagggtctcatctctttccctctctacatcccagggacgccctatgccaaagctgtgcaggcatgcaactcaacatctcatttacacaagtcgttaaactgtcaataaaattttcaggccattttatttttgtatacttaccataataacttcatacttttgtccgcgaatcctcacaggccagagcgaggatatcaagcactgtgaagggtattattgaggagaggaggaatgctggctccagcaacaagggtgatttccttgatgtgctgctttcaagcaatgagctctctgatgaggagaaagtgagctttgtgctggattccttactgggaggatatgagaccacctcactcttgatctccatggttgtgtatttccttgggcagtcagctcaagatctggaactagtgaaggtatacagacttctcatgctgaaaaagacagagcagtactggtaaataagtacttaattaagtggccatcaataaaatatatattaacatgtttgcatgcagagggagcatgaaggcataagatcgaagaaagagaaggacgagttcttgagctctgaagactataagaagatggaatatacccaacatgtaagatgatcgttcaatacatgctttaggattagttagtaagccaggggtacctttttttcctattatcagcaactacacaaatatgtgaccctccaaatatgaggtttactcatattcagaacgattctcctatgcctacccatatatgcaatttttgaattaagcaaaaaaaagaaaaagaaacagagagagaaagaatctcattacaatagagtgaaaagggcggaagggacatgttcttcaataatggaaactgtatgatgatgcatatgctatgcccttacaggttatcaatgaggcactgagatgtggcaacattgtcaagtttgtccacaggaaggctctcaaagatgtcagatacaaaggtaattaaccctacttgaggctttccttgaagattccattgtgctcatcacatgataatggatcaggcaaagtggatggttgcacctttattactgatttttaagcattgttattcctaaaatacctcagcttttcatagaagatgctcaaaagcaagtggctcttttttctttgctctgttgcagagtatctgattccttctggttggaaggtcctacctgttttcagtgctgttcatttgaaccccttacttcatggaaatgcccaacaatttcagccctgcagatgggaggtacgtttgtttccataatctgtgaatgctccgcaatacttactaaatgtttattgttaatgacctaatgaaaaatgttttggaccagctaggccacgaagcttagctttcacgtagtatacttttctataatacaaatttataaaatgaaaagttcagagcacctatcaagagagcttatctggagccttgaaagaatcttctttaaagggtgttctctaactaattgctacctttaattagtgagcgcccaactatgacataattactcgcaactattctggtgtcttcagatgccaaacaagctccctgtggctgcaatgccttttgtgcatggtcctaaccatgattcctctcattcaaagccagcattcttggctttgcttccttttcttagtttctgtgatgaagctaatggtctgattcatgtgtgttcctaatctgattgatgcaacagggtgcaagccaagggacaagcaagaagtttacgccgttcggcggtggcccccggctctgccctggatcagagcttgcaaaagtagaggctgctttcttcctccatcaccttgtgctcaattataggtaaaacaaaagggtatatttgtcctacccgagtagaagatgcatggatcaaagttgactggcttaaacagcaatgaacaaaatacgttcagaagtaatatttaagaagctggtgcagagtagttggtgtttaaataggccatagaaaactgttgaggcaaacatgaacaggaaaacatactgatgcagttaccactctcatactgataatacaccctacactagaccactagtaagtaatggcaagaaggccatgacagcaactaggcaaattatttatgcttttgtctgtaaggaccgcaagtctgaactcagctatcttgtgcattttcataagtggcactgtagagcatagaatcagacgacaacacacagaacaaacatgacagcatggagttttcgataggtaggctatgcaagttgagttgagggctgccatacaagataaaatatactaccacgatatgatcaaactcttttttttaaaaaaaaaaactaggttcattagcaacaatctatacgtgacaactgacaagaacaggcagatttatgtaaattatgcggttgtttctacatgtacttactgaatatccatgccagagaaaggctgatcatcgttcttcgtttctttcgtttcttgaaaacctgtgcagatggagaatcgatggcgatgacattccgatggcatacccgtacgtggagttccagagaggtctgcccatagaaatcgagccactttgctctgaatcctgacaggtttgcagttgcagccacggtgagcgagttcatcaaatcatccccgcaagcgagggggagatgcgcgcgagaacgacggactgagaggattagtcagtgaaacaaaaaaaggagagaaaatatttcaagaactgaagaaatgcactgggcattagctagtagtacctatcaatgagccaagctgagattgtaatttgctgtacatggtgtagatatattttgtccatgccgattgcttgcggtggtggtggtgcggtgcttcaccctgtaacatcctccactgtttcaactttcatctgctattctatagaagaaaaaaaaagaagaaaattgggctattgggctattgaaaagattttggatgaagccaaagatcttcaaaaacaaatcattgaaactttgaaagagtactcctatcctttaataatatgaacatgaacatgtatggactgtactctgcactacttctcagggaatttcggagcagacaaattcgatcgtggataatccctatcaatcggagatggctggtcccgtttggattggaggaatttctgaaggaatcctttcctgcaggggaaatcttagtttcagtgt

SEQ ID NO: 190 - DNA, 2361 bp, synthetic construct
  source 1..2361: mol_type = other DNA; note = Dwarf11 cDNA sequence - OB04G22900.1
tccatgcttgtgaggctcatgagatgagatgaacagggggtggtggtggtgcctggtgtgaggctgtgaggtatgatggtgggaggagagcttgtgctggctgctgtggtgatcctgcttgccttgctcctgaccctggtgctgagccacttcctgcctttgctcctgaatcccaaggctcccaagggcagctttgggtggcctctcctcggtgagacgctgaggtttctcaaacctcatgctagcaacaccctgggcagcttcctggaggatcactgctccaggtatgggaaggtgttcaagtcccatctgttctgcacccccaccatagtgtcctgtgaccaggagctgaaccacttcatccttcagaatgaggagaggctgtttcagtgcagctaccccaggccaattcatggcattctgggcaagtcctccatgttagtggtcctaggggaggaccacaaaaggctcaggaaccttgctctagcactggtcacctccacaaagctcaagcccagctaccttggtgacattgagaagattgcactgcatatagttgggtcatggcatggcaagagcaaggacaaggggagggtcaatgtcatcgccttctgcgaggaggcaagaaagttcgcattcagtgtaatagtgaagcaggtcctggggctgtcaccagaggagccggtcactgccaagatacttgaggattttctcgccttcatgaagggtctcatctctttccctctctacatcccagggacaccctatgccaaagctgtgcaggccagagagaggatatcaagaactgtgaagggtattattcaggagaggaggaatgctggatcaagcaacaagggcgatttccttgatgttctgctttcaagcaatgagctctctgatgaggagaaagtgagctttgtgctggattccttactaggaggatatgagaccacctcactcttgatctccatggttgtctatttccttgggcagtcagttcaagatctggaactagtgaagagggagcatgaaggcataaaatcgaagaaagagaagggggagttcttgagctctgaggactataagaagatggaatatacccaacatgttatcaatgaggcactgagatgtggcaacattgtcaagtttgtccataggaaggctctcaaagatgtcagatacaaagagtatctgattccttctggttggaaggtcctacctgttttcagtgctgttcatttgaaccccttacttcatggaaatgcccaacaatttcagccctgcaggtgggagggtgcaagccaagggacaagcaagaagtttacgccgttcggcggtggcccccggctttgccctggatcagagcttgccaaagtagaggctgctttcttcctccatcaccttgtgctcaattatagatggagaattgatggcgatgacattccgatggcatacccgtacgtggagttccagagaggtctgcccatagaaatcgagccactttgctctgaatcatgactggtttgcggtttcagccacggagagcaagtgcatcgatcaatcagtcccgcaagcgaggggaagatgcacgcaagaaaacggagaggattagtcagtgagaaaaaaaaaaaagattgcaagaaatgcactgggcactagttagtagtacctatcatgagtcatctgagattgtaatttgctgtacatggtgtagatatattttgtccatgctgattgcttgaggtggtggtggggggcttcaccctgtaacatcctccactgtttcaactactattctatagggaaaaaaaattgggctattgggatgtgggaggacttgcaattcctgttttctggaactcaatgaagccaaaatctctggaacaaatcactgaaactcaatgtaagagtactcatatcctgtacaaagacacttgaaagctgaatgcatattccctcccaaaaaaacctacttatatccttattatcctcttaactacctaaaaatgctcatatttgaataagatgctatggacattggacactactcacacaatgaacatgtatgtactgtactatctcagaggaactccggaatgcacatattcgatagcggaaaattcctgtcggattgcggaatcggagatgactggtcccgtatggattggaggaatttccaaaggaatgctctcctgcaggaaaatcttaggccaggtgcgtttggattgcaggaaaaaaaacgaataataggacattccaaaacggaagtttcctgtcgatcgccggaagacgattccggctggccggaatcacggggtaaaccatccaaacggaattctatgataccccctcgttttctct

SEQ ID NO: 191 - DNA, 1446 bp, synthetic construct
  source 1..1446: mol_type = other DNA; note = Dwarf11 coding sequence - OB04G22900.1
atgatggtgggaggagagcttgtgctggctgctgtggtgatcctgcttgccttgctcctgaccctggtgctgagccacttcctgcctttgctcctgaatcccaaggctcccaagggcagctttgggtggcctctcctcggtgagacgctgaggtttctcaaacctcatgctagcaacaccctgggcagcttcctggaggatcactgctccaggtatgggaaggtgttcaagtcccatctgttctgcacccccaccatagtgtcctgtgaccaggagctgaaccacttcatccttcagaatgaggagaggctgtttcagtgcagctaccccaggccaattcatggcattctgggcaagtcctccatgttagtggtcctaggggaggaccacaaaaggctcaggaaccttgctctagcactggtcacctccacaaagctcaagcccagctaccttggtgacattgagaagattgcactgcatatagttgggtcatggcatggcaagagcaaggacaaggggagggtcaatgtcatcgccttctgcgaggaggcaagaaagttcgcattcagtgtaatagtgaagcaggtcctggggctgtcaccagaggagccggtcactgccaagatacttgaggattttctcgccttcatgaagggtctcatctctttccctctctacatcccagggacaccctatgccaaagctgtgcaggccagagagaggatatcaagaactgtgaagggtattattcaggagaggaggaatgctggatcaagcaacaagggcgatttccttgatgttctgctttcaagcaatgagctctctgatgaggagaaagtgagctttgtgctggattccttactaggaggatatgagaccacctcactcttgatctccatggttgtctatttccttgggcagtcagttcaagatctggaactagtgaagagggagcatgaaggcataaaatcgaagaaagagaagggggagttcttgagctctgaggactataagaagatggaatatacccaacatgttatcaatgaggcactgagatgtggcaacattgtcaagtttgtccataggaaggctctcaaagatgtcagatacaaagagtatctgattccttctggttggaaggtcctacctgttttcagtgctgttcatttgaaccccttacttcatggaaatgcccaacaatttcagccctgcaggtgggagggtgcaagccaagggacaagcaagaagtttacgccgttcggcggtggcccccggctttgccctggatcagagcttgccaaagtagaggctgctttcttcctccatcaccttgtgctcaattatagatggagaattgatggcgatgacattccgatggcatacccgtacgtggagttccagagaggtctgcccatagaaatcgagccactttgctctgaatcatga

SEQ ID NO: 192 - protein, 481 aa, synthetic construct
  source 1..481: note = Dwarf11 protein sequence - OB04G22900.1
MMVGGELVLAAVVILLALLLTLVLSHFLPLLLNPKAPKGSFGWPLLGETLRFLKPHASNTLGSFLEDHCSRYGKVFKSHLFCTPTIVSCDQELNHFILQNEERLFQCSYPRPIHGILGKSSMLVVLGEDHKRLRNLALALVTSTKLKPSYLGDIEKIALHIVGSWHGKSKDKGRVNVIAFCEEARKFAFSVIVKQVLGLSPEEPVTAKILEDFLAFMKGLISFPLYIPGTPYAKAVQARERISRTVKGIIQERRNAGSSNKGDFLDVLLSSNELSDEEKVSFVLDSLLGGYETTSLLISMVVYFLGQSVQDLELVKREHEGIKSKKEKGEFLSSEDYKKMEYTQHVINEALRCGNIVKFVHRKALKDVRYKEYLIPSGWKVLPVFSAVHLNPLLHGNAQQFQPCRWEGASQGTSKKFTPFGGGPRLCPGSELAKVEAAFFLHHLVLNYRWRIDGDDIPMAYPYVEFQRGLPIEIEPLCSES

SEQ ID NO: 193 - DNA, 5873 bp, Oryza brachyantha
  source 1..5873: mol_type = genomic DNA; note = Dwarf11 genomic sequence - Oryza_brachyantha.v1.4b:4:11837902:11843774:-1
atagtaagcttcaccatcagagagcttaattatcaccaatgtcctatgcatcgatctgcacctggctctgcatgtacatgtaccccaatgcatttctctctctacctgcgtgtttgactgcaccttaagcagcagcagcagcctagatgctagctactctgcattggaccatcctcctagtcctaggctgtaggctcatagccctccttgataaaagctactactggcacagtatatgcatgcagccaattcacttcactgcagtaaaaaaaaaaaaagaaacagggatcaaaccatgcaagaaagaaatactcctacttctactttaaaacaaggccaaagcaaggaaacaaaaggctgcctcatattttttttccctgctcatgaccctttccatcaccctctccctttgcaaagatccttcctgcctttgcttctactgctatatagcctccccctcaccttccattccagagaaaaatagagggggggagaggagaagcagagtgtgagtgagagcagagtgaagggttggttagaaatttagaataggcaggaggcagagagtttattagctagtagggagcaagaaagaaacactccatgcttgtgaggctcatgagatgagatgaacagggggtggtggtggtgcctggtgtgaggctgtgaggtatgatggtgggaggagagcttgtgctggctgctgtggtgatcctgcttgccttgctcctgaccctggtgctgagccacttcctgcctttgctcctgaatcccaaggctcccaagggcagctttgggtggcctctcctcggtgagacgctgaggtttctcaaacctcatgctagcaacaccctgggcagcttcctggaggatcactgctccaggtaaattaatcatgcagtaacatttctatcaccaccacacacagagagggcaacaagtgtcatcttatcatgcaattaagtactgtaccattatttcatgtgacacggcaaaaggtaatgctgctgtcctgtccaagcaggctttatcataccctttttcttcctcctgatgggggctgtaaacatgaattggacagtgttagtagtgtaaagagttgtgcaacttttcttctgatgaacaagtgagaaaaaggaatgtaaaggttgcacactaacactagcatggtggtaacactactgatggcgtgatgatgatgcaggtatgggaaggtgttcaagtcccatctgttctgcacccccaccatagtgtcctgtgaccaggagctgaaccacttcatccttcagaatgaggagaggctgtttcagtgcagctaccccaggccaattcatggcattctgggcaagtcctccatgttagtggtcctaggggaggaccacaaaaggctcaggaaccttgctctagcactggtcacctccacaaagctcaagcccagctaccttggtgacattgagaagattgcactgcatatagttgggtcatggcatggcaagagcaaggacaaggggagggtcaatgtcatcgccttctgcgaggaggcaagaaaggttagcaagtgtactaactaaaaaccagaccatatcactagagagacatgatcccttgaaacaaggaaggaaaacctttgcacatgttagctacatcatcatgcatgttgttactgctgcatgaatcttgtcgcaaggtcactttgacttaccagggtcttttttttcttttctttttctctttggtgtgctctctttccttgagaagcacagttcgcattcagtgtaatagtgaagcaggtcctggggctgtcaccagaggagccggtcactgccaagatacttgaggattttctcgccttcatgaagggtctcatctctttccctctctacatcccagggacaccctatgccaaagctgtgcaggcatgcaacttaacttctcgtttacatatataagccattaaactgtcatataattttcaggccattttatttttgtgtacttaccataatagctctcattcttttgtctggtgatcctcacaggccagagagaggatatcaagaactgtgaagggtattattcaggagaggaggaatgctggatcaagcaacaagggcgatttccttgatgttctgctttcaagcaatgagctctctgatgaggagaaagtgagctttgtgctggattccttactaggaggatatgagaccacctcactcttgatctccatggttgtctatttccttgggcagtcagttcaagatctggaactagtgaaggtatacaggcttctcatgctgaataggacagagcagcagtggtaaataagtacttaattaagtggccatcactaaatatacgttaacatgtttgcatgcagagggagcatgaaggcataaaatcgaagaaagagaagggggagttcttgagctctgaggactataagaagatggaatatacccaacatgtaagatgatcattgaatgcatgctttaggtttggttaagccaggggtaccttttttcctattatcagcaactacacaaatacgtgaccgtccaaatatgtggtttactcctatgcctacccatatgtgcgtttttgacttcagcaaaaaaaggaaaaaagaaaacaaagagcatctaattatattagggtgaaaagggcaaatgggacttgttctgcaataatggaaactgtgtgatgatgcatatgctatgcccttacaggttatcaatgaggcactgagatgtggcaacattgtcaagtttgtccataggaaggctctcaaagatgtcagatacaaaggtaattaaccctacttgaggctttccttgaagattccattgtgctcatcacatgataatggatcatgcaaagtggatggttgcacctttattactgatttttaagaatttttattcctaaaatacctcagcttttcatacaagatgctcaaaagcaagtggctcttttttctttgctctgttgcagagtatctgattccttctggttggaaggtcctacctgttttcagtgctgttcatttgaaccccttacttcatggaaatgcccaacaatttcagccctgcaggtgggaggtatgtttgtttttcacaatctgtgaatgaacttagatttttggtacttactaaaatgtatattgttaatgaactaatgaaaaatgttttgaaccagctaggtcatgaagcttagctttttcacatagtatacttttctagaatacaaatttatataaaatgaaaagtttagagcacctatcaagagagcttatctggagccttgaaagaatcttcttgaaagggtgttctctaactaattgctacctttaattagtgagcgtccaactatgacataattactcgcaactattctggtgtcttcagatgccaagcaaggtccctgtggctgtaatgcctttttgtgcatggtcctaaccatgatccctctcattcaaagccagcattcttggctttgcaattttcttagtttctgtgatgaagctaatggtctgattcatgtgtattccttatctgattgatgcaacagggtgcaagccaagggacaagcaagaagtttacgccgttcggcggtggcccccggctttgccctggatcagagcttgccaaagtagaggctgctttcttcctccatcaccttgtgctcaattataggtaaaacaaaagggcatatttgttctttccgagtagaagatacatggatcaaagttgactgacccaaacagcaatgaacaagaaaaaacacgtccagaaataacaatctttaagaaactggtgcaaagtggttggtgtttaaatagggtaaaaaactgttgaggcaaaaatgaacaggaaaacagattgaggcagttgccactcatactaataatacacactagaccagtcactagtaagtaatagcaagaaggccatgacagcaactaggcaaattatttatgcttttgtctgcaaggaccgcaggtctgaactcagctatcttgtgcattttcataactggcactgtagagcatagcatcagacgacaacacacagaacaaacatgacagcatggagttttcgataggtaggctatgcaagttgagttgagggctgccatacgagataaaatataccgtgatatgatcgaacaaaaaaaaaaaaaaaaaaaaaactaggttcattagcaacaatatgtacgtgacaagagcaggcagggctatgaaatttatgttctgtttcggtgtagagtcgacatttaccatagtgttggctgatcaccgttcttcgtttcttgaaacctttgtgccgtgcagatggagaattgatggcgatgacattccgatggcatacccgtacgtggagttccagagaggtctgcccatagaaatcgagccactttgctctgaatcatgactggtttgcggtttcagccacggagagcaagtgcatcgatcaatcagtcccgcaagcgaggggaagatgcacgcaagaaaacggagaggattagtcagtgagaaaaaaaaaaaagattgcaagaaatgcactgggcactagttagtagtacctatcatgagtcatctgagattgtaatttgctgtacatggtgtagatatattttgtccatgctgattgcttgaggtggtggtggggggcttcaccctgtaacatcctccactgtttcaactactattctatagggaaaaaaaattgggctattgggatgtgggaggacttgcaattcctgttttctggaactcaatgaagccaaaatctctggaacaaatcactgaaactcaatgtaagagtactcatatcctgtacaaagacacttgaaagctgaatgcatattccctcccaaaaaaacctacttatatccttattatcctcttaactacctaaaaatgctcatatttgaataagatgctatggacattggacactactcacacaatgaacatgtatgtactgtactatctcagaggaactccggaatgcacatattcgatagcggaaaattcctgtcggattgcggaatcggagatgactggtcccgtatggattggaggaatttccaaaggaatgctctcctgcaggaaaatcttaggccaggtgcgtttggattgcaggaaaaaaaacgaataataggacattccaaaacggaagtttcctgtcgatcgccggaagacgattccggctggccggaatcacggggtaaaccatccaaacggaattctatgataccccctcgttttctcttccttcgcccatggtcgagggcgaactccagctcagccgcgccgggccgccacgccgcgccgcgacgcagcactgtcgccgaaccgctctcctgggttgcatttagtggaaggagagagatacgtatgagcgatctactggagaggataaaacatgatgtttaaaaaaaggggcaaaaaataaaacgagagaagtcaatgtttttttaaaataaaatttaaacatgtttattttgtctttttatgcttttattatttgttttttaactgtcgtccataaatttgaaaagcattagccttttcttaaaaaaaaaatcaagaatctaaaaatagcaaggtttggggaaaaatgaaaggattcgaaaaggcatcagagtatttgttaattgtcgtgcataaatttggaaaatataagtttttctttaaaaaaatcaggaatataaaaacaactgggtttgaaaaaaaataaaaatgcaaccaggaattttaaaacaacaaaaaataataaaaatgcaaggatttgaaaatgaaaaaatggcccatgcaggtctcgaacctgcgaccttcgcgttattagcacgacgctctaaccagctgagct

SEQ ID NO: 194 - DNA, 648 bp, synthetic construct
  source 1..648: mol_type = other DNA; note = Myb80 cDNA sequence - OB04G23000.1
atgggccgggtcccgtgctgcgagaaggacaacgtgaagcgcgggcagtggacgcccgaggaggacaacaagctgctcacctacatcacgcagtacggcacgcgcaactggcgcctcatccccaagaacgccgggttgcagcggtgcgggaagagctgccggctgcggtggaccaactacctccggcccgacctcaagcacggcgagttcaccgacgccgaggagcagaccatcatcaagctccactccgtcgtcggcaacaggtggtcggtgatcgcggcgcagctgccggggaggacggacaacgacgtgaagaaccactggaacacgaagctgaagaagaaactgtccgggatgggcatcgaccccgtcacgcacaagtcgttctcgcacctcatggccgagatcgccaccacgctggcgccgccgcaggtcgcgcacctcgccgaggccgccctggggtgcttcaaggacgagatgctccacctcctcaccaagaagcgcccctccgacttcccctcgcccgccgtgcccgacccggcgccagcgcgtccgcgctcgccgcgccatgcttcccctccgcgccacctcaggccaccgacgacaccatcgagcgcatcaagctgggcctgtcccgcgccatcatga

SEQ ID NO: 195 - DNA, 648 bp, synthetic construct; identical to SEQ ID NO: 194
  source 1..648: mol_type = other DNA; note = Myb80 coding sequence - OB04G23000.1

SEQ ID NO: 196 - protein, 215 aa, synthetic construct
  source 1..215: note = Myb80 protein sequence - OB04G23000.1
MGRVPCCEKDNVKRGQWTPEEDNKLLTYITQYGTRNWRLIPKNAGLQRCGKSCRLRWTNYLRPDLKHGEFTDAEEQTIIKLHSVVGNRWSVIAAQLPGRTDNDVKNHWNTKLKKKLSGMGIDPVTHKSFSHLMAEIATTLAPPQVAHLAEAALGCFKDEMLHLLTKKRPSDFPSPAVPDPAPARPRSPRHASPPRHLRPPTTPSSASSWACPAPS

SEQ ID NO: 197 - DNA, 3113 bp, Oryza brachyantha
  source 1..3113: mol_type = genomic DNA; note = Myb80 genomic sequence - Oryza_brachyantha.v1.4b:4:11905173:11908285:-1
tactgatgttaatctagcaacattgcaagccaacactacaattaatcctgacaaatttaggacgttgtaatctcttgccaaacagatcattcagatctcaggcttttgactgaattgaggccgagagctgtgcatttggcacaggcagtttacgttgtcaggaagcgcattttcagacctattgatcgatcggtcgatgctacacgaggcgtcaatctcatcgccgcgagcggagaagcggcgccagtgagcgagacggcgagagaacgcgagcggcgccgggagcgcgcggcttggaccggggggttgacccggcgctgcgcgggtgggcaacctgtcccgcccccccgctcacgcgttgcgcgggcgttgaattctttatgccgccttcgcccggcgcgcgcacggcacgcacgcacgctcgcacttccgtgccgccggcgaggcagaccgcgcccccgcccgcgcccaggccgcacgcctatttatacacgcggcgcatggggtgtgtacggccgtcgggtcgcctcgtcgtcagcagcggcagcggagtctctctgtcacacacacctcgatcggcgggacggggcggcgggcgccatgggccgggtcccgtgctgcgagaaggacaacgtgaagcgcgggcagtggacgcccgaggaggacaacaagctgctcacctacatcacgcagtacggcacgcgcaactggcgcctcatccccaagaacgccggtacgccagagacagagcgcgtggtcgagcacgcagcggtggccgtgggagtggctctgaccgggttgggtgttgccgtggcgtggcagggttgcagcggtgcgggaagagctgccggctgcggtggaccaactacctccggcccgacctcaagcacggcgagttcaccgacgccgaggagcagaccatcatcaagctccactccgtcgtcggcaacaggtaaccatgaatgatctaccgcaggttctggttttgatcagcttggggatactgtaattgagcaatgcgagccgtgcgtgcaggtggtcggtgatcgcggcgcagctgccggggaggacggacaacgacgtgaagaaccactggaacacgaagctgaagaagaaactgtccgggatgggcatcgaccccgtcacgcacaagtcgttctcgcacctcatggccgagatcgccaccacgctggcgccgccgcaggtcgcgcacctcgccgaggccgccctggggtgcttcaaggacgagatgctccacctcctcaccaagaagcgcccctccgacttcccctcgcccgccgtgcccgacgtcatggcgggcgcgcgnnnnnnnnnnnnnnnnnnnnnnnnnnnnnnnnnnnnnnnnnnnnnnnnnnnnnnnnnnnnnnnnnnnnnnnnnnnnnnnnnnnnnnnnnnnnnnnnnnnnnnnnnnnnnnnnnnnnnnnnnnnnnnnnnnnnnnnnnnnnnnnnnnnnnnnnnnnnnnnnnnnnnnnnnnnnnnnnnnnnnnnnnnnnnnnnnnnnnnnnnnnnnnnnnnnnnnnnnnnnnnnnnnnnnnnnnnnnnnnnnnnnnnnnnnnnnnnnnnnnnnnnnnnnnnnnnnnnnnnnnnnnnnnnnnnnnnnnnnnnnnnnnnnnnnnnnnnnnnnnnnnnnnnnnnnnnnnnnnnnnnnnnnnnnnnnnnnnnnnnnnnnnnnnnnnnnnnnnnnnnnnnnnnnnnnnnnnnnnnnnnnnnnnnnnnnnnnnnnnnnnnnnnnnnnnnnnnnnnnnnnnnnnnnnnnnnnnnnnnnnnnnnnnnnnnnnnnnnnnnnnnnnnnnnnnnnnnnnnnnnnnnnnnnnnnnnnnnnnnnnnnnnnnnnnnnnnnnnnnnnnnnnnnnnnnnnnnnnnnnnnnnnnnnnnnnnnnnnnnnnnnnnnnnnnnnnnnnnnnnnnnnnnnnnnnnnnnnnnnnnnnnnnnnnnnnnnnnnnnnnnnnnnnnnnnnnnnnnnnnnnnnnnnnnnnnnnnnnnnnnnnnnnnnnnnnnnnnnnnnnnnnnnnnnnnnnnnnnnnnnnnnnnnnnnnnnnnnnnnnnnnnnnnnnnnnnnnnnnnnnnnnnnnnnnnnnnnnnnnnnnnnnnnnnnnnnnnnnnnnnnnnnnnnnnnnnnnnnnnnnnnnnnnnnnnnnnnnnnnnnnnnnnnnnnnnnnnnnnnnnnnnnnnnnnnnnnnnnnnnnnnnnnnnnnnnnnnnnnnnnnnnnnnnnnnnnnnnnnnnnnnnnnnnnnnnnnnnnnnnnnnnnnnnnnnnnnnnnnnnnnnnnnnnnnnnnnnnnnnnnnnnnnnnnnnnnnnnnnnnnnnnnnnnnnnnnnnnnnnnnnnnnnnnnnnnnnnnnnnnnnnnnnnnnnnnnnnnnnngcccgccgtcgtggcggccggcgccagcgcgtccgcgctcgccgcgccatgcttcccctccgcgccacctcaggccaccgacgacaccatcgagcgcatcaagctgggcctgtcccgcgccatcatgagcgagcccgccgccgccgctccagcagaggacaagccgtggccaccaacccccgccgccgccgccgctccagcagaggacaaactgtggccgcccgacgacttgtttgaggggctcgccaggatgtacgccacatacatttcggcgcacgcgcaggccgagttccggtacgacggagctgcggcgcctggctacgtcctcggcggcgagggcgaccagggcacgtcgatgtggagccaccagagtctgtacagcgtgagctccggcaccgaggaggccaggcgggcattgccggagaaaggcaacgacagcgtcggcagcagcggcggcgacgacgacgcggacgacggcaaggacagcgggaagggaggagcctccgacatgtcgggcctgtttgcctccgactgcgtgctctgggacttgcccgacgagctcacgaatcacatggtctaagctagctaaaacgcgcgaaatttggcacgaccaagcacgccatgatcaagaacagcgcttgcattgcacgtggatagaattggacatagcgaaaaattgagaccaataatatttactgaaagagcgacagaaaactagagtacataca

SEQ ID NO: 198 - DNA, 1443 bp, synthetic construct
  source 1..1443: mol_type = other DNA; note = Dwarf11 cDNA sequence - ORGLA04G0126200.1
atggtgggaggagagcttgtgctggctgctctggtgatcctgcttgctttgctcctgaccctggtgctgagccacttcctgcctttgctcctgaatcccaaggctcccaagggaagctttgggtggcctctccttggtgagacgctgaggttcctcagtcctcatgctagcaacaccctgggcagcttcctggaggatcactgctccaggtatgggagggtgtttaagtcccatctgttctgcacccccaccatagtgtcctgtgaccaggagctgaaccacttcatccttcagaatgaggagaggctgtttcagtgcagctaccccaggccaattcatggcattctgggcaagtcctccatgttagtggtcctaggggaggaccacaagaggctcaggaaccttgctctagcactggtcacctccacaaagctcaagcccagctaccttggcgacattgagaagattgcactgcatatagttgggtcatggcatggcaagagcaaggacaaggggatggtcaatgtcatcgccttctgcgaggaggcaagaaagtttgcattcagtgtaatagtgaagcaggtgctggggctatcaccagaggagccggtcactgccatgatacttgaagatttcctcgccttcatgaagggtctcatctctttccctctctacatcccagggacgccctatgccaaagctgtgcaggccagagcgaggatatcaagcactgtgaagggtattattgaggagaggaggaatgctggctccagcaacaagggtgatttccttgatgtgctgctttcaagcaatgagctctctgatgaggagaaagtgagctttgtgctggattccttactgggaggatatgagaccacctcactcttgatctccatggttgtgtatttccttgggcagtcagctcaagatctggaactagtgaagagggagcatgaaggcataagatcgaagaaagagaaggacgagttcttgagctctgaagactataagaagatggaatatacccaacatgttatcaatgaggcactgagatgtggcaacattgtcaagtttgtccacaggaaggctctcaaagatgtcagatacaaagagtatctgattccttctggttggaaggtcctacctgttttcagtgctgttcatttgaaccccttacttcatggaaatgcccaacaatttcagccctgcagatgggagggtgcaagccaagggacaagcaagaagtttacgccgttcggcggtggcccccggctctgccctggatcagagcttgcaaaagtagaggctgctttcttcctccatcaccttgtgctcaattatagatggagaatcgatggcgatgacattccgatggcatacccatacgtggagttccagagaggtctgcccatagaaatcgagccactttgctctgaatcctga

SEQ ID NO: 199 - DNA, 1443 bp, synthetic construct; identical to SEQ ID NO: 198
  source 1..1443: mol_type = other DNA; note = Dwarf11 coding sequence - ORGLA04G0126200.1

SEQ ID NO: 200 - protein, 480 aa, synthetic construct
  source 1..480: note = Dwarf11 protein sequence - ORGLA04G0126200.1
MVGGELVLAALVILLALLLTLVLSHFLPLLLNPKAPKGSFGWPLLGETLRFLSPHASNTLGSFLEDHCSRYGRVFKSHLFCTPTIVSCDQELNHFILQNEERLFQCSYPRPIHGILGKSSMLVVLGEDHKRLRNLALALVTSTKLKPSYLGDIEKIALHIVGSWHGKSKDKGMVNVIAFCEEARKFAFSVIVKQVLGLSPEEPVTAMILEDFLAFMKGLISFPLYIPGTPYAKAVQARARISSTVKGIIEERRNAGSSNKGDFLDVLLSSNELSDEEKVSFVLDSLLGGYETTSLLISMVVYFLGQSAQDLELVKREHEGIRSKKEKDEFLSSEDYKKMEYTQHVINEALRCGNIVKFVHRKALKDVRYKEYLIPSGWKVLPVFSAVHLNPLLHGNAQQFQPCRWEGASQGTSKKFTPFGGGPRLCPGSELAKVEAAFFLHHLVLNYRWRIDGDDIPMAYPYVEFQRGLPIEIEPLCSES

SEQ ID NO: 201 - DNA, 5046 bp, Oryza glaberrima
  source 1..5046: mol_type = genomic DNA; note = Dwarf11 genomic sequence - Oryza_glaberrima_V1:4:15903746:15908791:-1
cctttccatcactccctccctttgcaaagatccttcctgcctttgcttctactgctatatagcctcccccctcaccttccattccagagaaaaatagagggagggagagggagagaagcagagtgttgagcacaagctagtgaaagggttagatagaaacttggtagaatagacagataggcagagagagagagagagagagagagagagagagagagagagagagagtannnnnnnnnnnnnnnnnnnnnnnnnnnnnnnnnnnnnnnnnnnnnnnnnnnnnnnnnnnnnnnnnnnnnnnnnnnnnnnnnnnnnnnnnnnnnnnnnnnnnnnnnnnnnnnnnnnnnnnnnnnnnnnnnnnnnnnnnnnnnnnnnnnnnnnnnnnnnnnnnnnnnnnnnnnnnnnnnnnnnnnnnnnnnnnnnnnnnnnnnnnnnnnnnnnnnnnnnnnnnnnnnnnnnnnnnnnngagagagagagagagagagcttagcaagctaaggcttagctgctgcaaggctccatccatgcttcttgttgtgagatgagattgagataagatgagcagggggtggtggtgcctggtgtgaggcaataggtaagatggtgggaggagagcttgtgctggctgctctggtgatcctgcttgctttgctcctgaccctggtgctgagccacttcctgcctttgctcctgaatcccaaggctcccaagggaagctttgggtggcctctccttggtgagacgctgaggttcctcagtcctcatgctagcaacaccctgggcagcttcctggaggatcactgctccaggtaaattaaaatcatatgcagtaaacatttctatcagtatcaccaccacaaccacacaggagcaacaagtgtcatcttaccatgcaattaagtactgtaccattatttcatgtgacagcaaaaggtaatgctgctgtcctgtcccagcagctttatcacgccctttttcttcctccctgatgaggggggtgctgtaacatgaattggacagtgtttagcatcttgttaaagagttgtgcaaaccttttcttccgatgaacaagcgagagaaaaggaatgtaaaggttgcacaacacttaactagctagcatgcatggtggtagtaacactgatgatggtgtgatgatgatgatgcaggtatgggagggtgtttaagtcccatctgttctgcacccccaccatagtgtcctgtgaccaggagctgaaccacttcatccttcagaatgaggagaggctgtttcagtgcagctaccccaggccaattcatggcattctgggcaagtcctccatgttagtggtcctaggggaggaccacaagaggctcaggaaccttgctctagcactggtcacctccacaaagctcaagcccagctaccttggcgacattgagaagattgcactgcatatagttgggtcatggcatggcaagagcaaggacaaggggatggtcaatgtcatcgccttctgcgaggaggcaagaaaggttagcaagtgtactaacttgaaaccagagccatatcaccacaaggacatgatcccttgaaacaagggagggaaaactttgcacatgttagctacataccatcatcatcatgttgttacttgctgctgcatgaatctttgtcccaaggtcactttgacttaccatggtcttttttaccttttctttttttttctctctctggtgtgctctctttccttgagaaccacagtttgcattcagtgtaatagtgaagcaggtgctggggctatcaccagaggagccggtcactgccatgatacttgaagatttcctcgccttcatgaagggtctcatctctttccctctctacatcccagggacgccctatgccaaagctgtgcaggcatgcaactcaacatctcatttacacaagtcgttaaactgtcaataaaattttcaggccattttatttttgtatacttaccataataacttcatccttttgtccgcgaatcctcacaggccagagcgaggatatcaagcactgtgaagggtattattgaggagaggaggaatgctggctccagcaacaagggtgatttccttgatgtgctgctttcaagcaatgagctctctgatgaggagaaagtgagctttgtgctggattccttactgggaggatatgagaccacctcactcttgatctccatggttgtgtatttccttgggcagtcagctcaagatctggaactagtgaaggtatacagacttctcatgctgaaaaagacagagcagtactggtaaataagtacttaattaagtggccatcaataaaatatatattaacatgtttgcatgcagagggagcatgaaggcataagatcgaagaaagagaaggacgagttcttgagctctgaagactataagaagatggaatatacccaacatgtaagatgatcgttcaatacatgctttaggattagttagtaagccaggggtacctttttttcctattatcagcaactacacaaatatgtgaccctccaaatatgaggtttactcatattcagaacgattctcctatgcctacccatatatgcaatttttgaattaagcaaaaaaaagaaaaagaaacagagagagaaagaatctcattacaatagagtgaaaagggcggaagggacatgttcttcaataatggaaactgtatgatgatgcatatgctatgcccttacaggttatcaatgaggcactgagatgtggcaacattgtcaagtttgtccacaggaaggctctcaaagatgtcagatacaaaggtaattaaccctacttgaggctttccttgaagattccattgtgctcatcacatgataatggatcaggcaaagtggatggttgcacctttattactgatttttaagcattgttattcctaaaatacctcagcttttcatagaagatgctcaaaagcaagtggctcttttttctttgctctgttgcagagtatctgattccttctggttggaaggtcctacctgttttcagtgctgttcatttgaaccccttacttcatggaaatgcccaacaatttcagccctgcagatgggaggtacgtttgtttccataatctgtgaatgctccgcaatacttactaaatgtttattgttaatgacctaatgaaaaatgttttggaccagctaggccacgaagcttagctttcacgtagtatacttttctataatacaaatttataaaatgaaaagttcagagcacctatcaagagagcttatctggagccttgaaagaatcttctttaaagggtgttctctaactaattgctacctttaattagtgagcgcccaactatgacataattactcgcaactattctggtgtcttcagatgccaaacaagctccctgtggctgcaatgccttttgtgcatggtcctaaccatgattcctctcattcaaagccagcattcttggctttgcttccttttcttagtttctgtgatgaagctaatggtctgattcatgtgtgttcctaatctgattgatgcaacagggtgcaagccaagggacaagcaagaagtttacgccgttcggcggtggcccccggctctgccctggatcagagcttgcaaaagtagaggctgctttcttcctccatcaccttgtgctcaattataggtaaaacaaaagggtatatttgtcctacccgagtagaagatgcatggatcaaagttgactggcttaaacagcaatgaacaaaatacgttcagaagtaatatttaagaagctggtgcagagtagttggtgtttaaataggccatagaaaactgttgaggcaaacatgaacaggaaaacatactgatgcagttaccactctcatactgataatacacactacactagaccactagtaagtaatggcaagaaggccatgacagcaactaggcaaattatttatgcttttgtctgtaaggaccgcaagtctgaactcagctatcttgtgcattttcataagtggcactgtagagcatagaatcagacgacaacacacagaacaaacatgacagcatggagttttcgataggtaggctatgcaagttgagttgagggctgccatacaagataaaatatactaccacgatatgatcaaactcttttttttaaaaaaaaaaactaggttcattagcaacaatctatacgtgacaactgacaagaacaggcagatttatgtaaattatgcggttgtttcagagtagagtctacatgtacttactgaatatccatgccagagaaaggctgatcatcgttcttcgtttctttcgtttcttgaaaacctgtgcagatggagaatcgatggcgatgacattccgatggcatacccatacgtggagttccagagaggtctgcccatagaaatcgagccactttgctctgaatcctgacaggtttgcagttgcagccacggtgagcgagttcatcaaatcatccccgcaagcgagggggagatgcgcgcgagaacgacggactgagaggattagtcagtgaaacaaaaaaaggagagaaaatatttcaagaactgaagaaatgcactgggcattagctagtagtacctatcaatgagccaagctgagattgtaatttgctgtacatggtgtagatatattttgtccatgccgattgcttgcggtggtggtggtgcggtgcttcaccctgtaacatcctccactgtttcaactttcatctgctattctatagaagaaaaaaaaagaagaaaattgggctattgggctattgaaaagattttggatgaagccaaagatcttcaaaaacaaatcattgaaactttgaaagagtactcctatcctttaataatatgaacatgaacatgtatggactgtactctgcactacttctcagggaatttcggagcagacaaattcgatcgtggataatccctatcaatcggagatggctggtcccgtttggattggaggaatttctgaaggaatcctttcctgcaggggaaatcttagtttcagtgt

SEQ ID NO: 202 - DNA, 1119 bp, synthetic construct
  source 1..1119: mol_type = other DNA; note = Myb80 cDNA sequence - ORGLA04G0126700.1
atggggcgggtgccgtgctgcgagaaggacaatgtgaagcgcgggcagtggacgcccgaggaggacaacaagctgctctcctacatcacccagtacggcacccgcaactggcgcctcatccccaagaacgccgggttgcagcggtgcgggaagagctgccggctgcggtggaccaactacctccggcccgacctcaagcacggcgagttcaccgacgccgaggagcagaccatcatcaagctccactccgtcgtcggcaacaggtggtcggtgatcgcggcgcagcttccggggcggacggacaacgacgtgaagaaccactggaacacgaagctgaagaagaagctgtccgggatgggcatcgaccccgtcacgcacaagtccttctcgcacctcatggccgagatcgccaccacgctggcgccaccgcaggtggcgcacctcgccgaggccgcgctggggtgcttcaaggacgagatgctccacctcctcaccaagaagcgcccctccgacttcccctcgcccgccgtgcacgacggcgccggcgccggcgccagcgcgtccgcgctcgccgcgccctgcttccccgccgcgccgccgcaccacccgcaggccgacgacaccatcgagcgcatcaagctcggcctgtcccgcgccatcatgagcgatccctccaccgcctccgccgccgccgccgccgccgcgccctccgcccccgcggaggacaagccgtggccgcccggcgacatgtccgaggggctcgccgggatgtacgccacgtacaacccggcggcgcacgcgcacgcgcaggcccaggccgagttccggtacgacggggcctccgcggcgcagggctacgtcctcggcggcgacagcgaccagggcacgtcgatgtggagccaccagagcctgtacagcgggagctccggcaccgaggaggccaggcgggcgttgccggagaagggcaacgacagcgtcggcagcagcggcggcgacgacgacgccgcggacgacggcaaggacagcgggaagggggcagcctccgacatgtcgggtctgttcgcctccgactgcgtgctctgggacttgcccgacgagctcacgaatcacatggtgtag

SEQ ID NO: 203 - DNA, 1119 bp, synthetic construct; identical to SEQ ID NO: 202
  source 1..1119: mol_type = other DNA; note = Myb80 coding sequence - ORGLA04G0126700.1

SEQ ID NO: 204 - protein, 372 aa, synthetic construct
  source 1..372: note = Myb80 protein sequence - ORGLA04G0126700.1
MGRVPCCEKDNVKRGQWTPEEDNKLLSYITQYGTRNWRLIPKNAGLQRCGKSCRLRWTNYLRPDLKHGEFTDAEEQTIIKLHSVVGNRWSVIAAQLPGRTDNDVKNHWNTKLKKKLSGMGIDPVTHKSFSHLMAEIATTLAPPQVAHLAEAALGCFKDEMLHLLTKKRPSDFPSPAVHDGAGAGASASALAAPCFPAAPPHHPQADDTIERIKLGLSRAIMSDPSTASAAAAAAAPSAPAEDKPWPPGDMSEGLAGMYATYNPAAHAHAQAQAEFRYDGASAAQGYVLGGDSDQGTSMWSHQSLYSGSSGTEEARRALPEKGNDSVGSSGGDDDAADDGKDSGKGAASDMSGLFASDCVLWDLPDELTNHMV

SEQ ID NO: 205 - DNA, 2509 bp, Oryza glaberrima
  source 1..2509: mol_type = genomic DNA; note = Myb80 genomic sequence - Oryza_glaberrima_V1:4:15945446:15947954:-1
cagcccatagaaatatgcattccccttgcttgtaaagatcctactaggataaaactgtgtgcagaaatgaatcgtttatctttgacagttttttttttctttttgagtctatcctcctgaacctaaggctgtaaatttgttcggacaaaggatcattactcatagcctgctatgttcacaaggttttatattactgaatagtggtgtttcatcaagcagcattagtgaatagttgcagtggcagtgtggtgcagggcgtcagtgagcgagatggcgaggcgagaacgcgagcggcgccgggagcgcgcggggcttggaccgtggccgtgaggggggttgacccggcgctgcgcgggtgggcaacctgtcccgccccccccggggggaggctcacgcgttgcgcgggcgttgaattctttatgccgcccatgccgccttcgccccccgtcccgcgcgcgcgcgcgcccactcgccggcgcggcagcgcgcgcgcgcgcgcgcgggcggtcgcgaggccgcgagcctatttataacacgcggcgcggccgtgtgagcgccgcacgcacgcagcagcagcggaatctcgacggcggcgacatcatggggcgggtgccgtgctgcgagaaggacaatgtgaagcgcgggcagtggacgcccgaggaggacaacaagctgctctcctacatcacccagtacggcacccgcaactggcgcctcatccccaagaacgccggtacgttggcgcgcgcgccgctaccggcgaacgcgtggttgcagcagcggcggcgctctgaccggggtgtttgttgctggaacgttggcagggttgcagcggtgcgggaagagctgccggctgcggtggaccaactacctccggcccgacctcaagcacggcgagttcaccgacgccgaggagcagaccatcatcaagctccactccgtcgtcggcaacaggtaggcatcaacgagtggtctcgctacaccgtcttgtgatcttgggtcatttttggaggaatgtattgagcaatgcgggatggggctgtgtgtggcaaggtggtcggtgatcgcggcgcagcttccggggcggacggacaacgacgtgaagaaccactggaacacgaagctgaagaagaagctgtccgggatgggcatcgaccccgtcacgcacaagtccttctcgcacctcatggccgagatcgccaccacgctggcgccaccgcaggtggcgcacctcgccgaggccgcgctggggtgcttcaaggacgagatgctccacctcctcaccaagaagcgcccctccgacttcccctcgcccgccgtgcacgacggcgccggcgccggcgccagcgcgtccgcgctcgccgcgccctgcttccccgccgcgccgccgcaccacccgcaggccgacgacaccatcgagcgcatcaagctcggcctgtcccgcgccatcatgagcgatccctccaccgcctccgccgccgccgccgccgccgcgccctccgcccccgcggaggacaagccgtggccgcccggcgacatgtccgaggggctcgccgggatgtacgccacgtacaacccggcggcgcacgcgcacgcgcaggcccaggccgagttccggtacgacggggcctccgcggcgcagggctacgtcctcggcggcgacagcgaccagggcacgtcgatgtggagccaccagagcctgtacagcgggagctccggcaccgaggaggccaggcgggcgttgccggagaagggcaacgacagcgtcggcagcagcggcggcgacgacgacgccgcggacgacggcaaggacagcgggaagggggcagcctccgacatgtcgggtctgttcgcctccgactgcgtgctctgggacttgcccgacgagctcacgaatcacatggtgtagctaagctataaaacgcgggaaaacttagcacggcgaagcacgccatgatccacatcacttgcagttgcaggtggtgagaattggatagagcgaaaaattgctaccaataatattgctgaaagagtgacagaaaaagtgaaaaactatagtatgtagctggcaagaaaaatggggattctttttgcttggaaaagagaaaaaaaaagtgagatgtgaatagttttaccgagaagcactgattgattgagtgattgagccggaggccaaggtatttttccagtcctctgcttcagtcgcactccatgagcaatggataattcaattcagttcagacagattgtttacttcttccatggatcatattgtctgatgatgaggttgatgggaaaacgtcaatatgcaactctagcatgttatataaatggtcatgaaaattcagagaaaaaaaaatctataacaacgctgcacccaaaaagattgtgtgctgtctaaacttcagaaaatcatgtgaaatttctgaattttaaccatgagttgcacaactgtaccaaagaaggctagaacccagaaataaaacctgtggatctgacactttgatag

SEQ ID NO: 206 - DNA, 1437 bp, synthetic construct; identical to SEQ ID NO: 186
  source 1..1437: mol_type = other DNA; note = Dwarf11 cDNA sequence - OGLUM04G15480.1

SEQ ID NO: 207 - DNA, 1437 bp, synthetic construct; identical to SEQ ID NO: 186
  source 1..1437: mol_type = other DNA; note = Dwarf11 coding sequence - OGLUM04G15480.1

SEQ ID NO: 208 - protein, 478 aa, synthetic construct; identical to SEQ ID NO: 188
  source 1..478: note = Dwarf11 protein sequence - OGLUM04G15480.1

SEQ ID NO: 209 - DNA, 5048 bp, Oryza glumipatula
  source 1..5048: mol_type = genomic DNA; note = Dwarf11 genomic sequence - Oryza_glumaepatula_v1.5:4:20865448:20870495:-1
caccttgagcagcagcagcagcctagatgctagctactctgcattggaccatcctcctagtcctaggctgtaggctcatagccctccttgataaaagctactactggcacagtatatgcatgcagccaattcacttcactgcagtaaaaaaaaaaaagaaaacagagagaaacagagatcaaacaatgcaagaaagaaatacccctacttctactttaaaacaaggccaaagcaaggaaacaaaaggcagcctctattttttttcccttccccccctgctcatcacccctttccatcactccctccctttgcaaagatccttcctgcctttgcttctactgctatatagcctcccccctcaccttccattccagagaaaaatagagggagggagagggagagaagcagagtgttgagcacaagctagtgaaagggttagatagaaacttggtagaatagacagataggcagagagagagagagagcttagcaagctaaggcttagctgctgcaaggctccatccatgcttcttgttgtgagatgagattgagataagatgagcagggggtggtggtgcctggtgtgaggctataggtaagatggtgggaggagagcttgtgctggctgctctggtgatcctgcttgctttgctcctgaccctggtgctgagccacttcctgcctttgctcctgaatcccaaggctcccaagggaagctttgggtggcctctccttggtgagacgctgaggttcctcagtcctcatgctagcaacaccctgggcagcttcctggaggatcactgctccaggtaaattaaaatcatatgcagtaaacatttctatcagtatcaccaccacaaccacacaggagcaacaagtgtcatcttaccatgcaattaagtactgtaccattatttcatgtgacagcaaaaggtaatgctgctgtcctgtcccagcagctttatcacgccctttttcttcctccctgatgagggggggtgctgtaacatgaattggacagtgtttagcatcttgttaaagagttgtgcaaaccttttcttccgatgaacaagcgagagaaaaggaatgtaaaggttgcacaacacttaactagctagcatgcatggtggtagtaacactgatgatggtgtgatgatgatgatgcaggtatgggagggtgtttaagtcccatctgttctgcacccccaccatagtgtcctgtgaccaggagctgaaccacttcatccttcagaatgaggagaggctgtttcagtgcagctaccccaggccaattcatggcattctgggcaagtcctccatgttagtggtcctaggggaggaccacaagaggctcaggaaccttgctctagcactggtcacctccacaaagctcaagcccagctaccttggcgacattgagaagattgcactgcatatagttgggtcatggcatggcaagagcaaggacaaggggatggtcaatgtcatcgccttctgcgaggaggcaagaaaggttagcaagtgtactaacttgaaaccagagccatatcaccacaaggacatgatcccttgaaacaagggagggaaaactttgcacatgttagctacataccatcatcatcatgttgttacttgctgctgcatgaatctttgtcccaaggtcactttgacttaccatggtcttttttaccttttcttttttttctctctctctggtgtgctctctttccttgagaaccacagtttgcattcagtgtaatagtgaagcaggtgctggggctatcaccagaggagccggtcactgccatgatacttgaagatttcctcgccttcatgaagggtctcatctctttccctctctacatcccagggacgccctatgccaaagctgtgcaggcatgcaactcaacatctcatttacacaagtcgttaaactgtcaataaaattttcaggccattttatttttgtatacttaccataataacttcatccttttgtccgcgaatcctcacaggccagagcgaggatatcaagcactgtgaagggtattattgaggagaggaggaatgctggctccagcaacaagggtgatttccttgatgtgctgctttcaagcaatgagctctctgatgaggagaaagtgagctttgtgctggattccttactgggaggatatgagaccacctcactcttgatctccatggttgtgtatttccttgggcagtcagctcaagatctggaactagtgaaggtatacagacttctcatgctgaaaaagacagagcagtactggtaaataagtacttaattaagtggccatcaataaaatatatattaacatgtttgcatgcagagggagcatgaaggcataagatcgaagaaagagaaggacgagttcttgagctctgaagactataagaagatggaatatacccaacatgtaagatgatcgttcaatacatgctttaggattagttagtaagccaggggtacctttttttcctattatcagcaactacacaaatatgtgaccctccaaatatgaggtttactcatattcagaccgattctcctatgcctacccatatatgcaatttttgaattaagcaaaaaaaagaaaaagaaacagagagagaaagaatctcattacaatagagtgaaaagggcggaagggacatgttcttcaataatggaaactgtatgatgatgcatatgctatgcccttacaggttatcaatgaggcactgagatgtggcaacattgtcaagtttgtccacaggaaggctctcaaagatgtcagatacaaaggtaattaaccctacttgaggctttccttgaagattccattgtgctcatcacatgataatggatcaggcaaagtggatggttgcacctttattactgatttttaagcattgttattcctaaaatacctcagcttttcatagaagatgctcaaaagcaagtggctcttttttctttgctctgttgcagagtatctgattccttctggttggaaggtcctacctgttttcagtgctgttcatttgaaccccttacttcatggaaatgcccaacaatttcagccctgcagatgggaggtacgtttgtttccataatctgtgaatgctccgcaatacttactaaatgtttattgttaatgacctaatgaaaaatgttttggaccagctaggccacgaagcttagctttcacgtagtatacttttctataatacaaatttataaaatgaaaagttcagagcacctatcaagagagcttatctggagccttgaaagaatcttctttaaagggtgttttctaactaattgctacctttaattagtgagcgcccaactatgacataattactcgcaactattctggtgtcttcagatgccaaacaagctccctgtggctgcaatgccttttgtgcatggtcctaaccatgattcctctcattcaaagccagcattcttggctttgcttccttttcttagtttctgtgatgaagctaatggtctgattcatgtgtgttcctaatctgattgatgcaacagggtgcaagccaagggacaagcaagaagtttacgccgttcggcggtggcccccggctctgccctggatcagagcttgcaaaagtagaggctgctttcttcctccatcaccttgtgctcaattataggtaaaacaaaagggtatatttgtcctacccgagtagaagatgcatggatcaaagttgactggcttaaacagcaatgaacaaaatacgttcagaagtaatatttaagaagctggtgcagagtagttggtgtttaaataagccatagaaaactgttgaggcaaacatgaacaggaaaacatactgatgcagttaccactctcatactgataatacacactacactagaccactagtaagtaatggcaagaaggccatgacagcaactaggcaaattatttatgcttttgtctgtaaggaccgcaagtctgaactcatctatcttgtgcattttcataagtggcactgtagagcatagaatcagacgacaacacacagaacaaacatgacagcatggagttttcgataggtaggctatgcaagttgagttgagggctgccatacaagataaaatatactaccacgatatgatcaaactcttttttttttaaaaaaaaactaggttcattagcaacaatctatacgtgacaactgacaagaacaggcagatttatgtaaattatgcggttgtttcagagtagagtctacatgtacttactgaatatccatgccagagaaaggctgatcatcgttcttcgtttctttcgtttcttgaaaacctgtgcagatggagaatcgatggcgatgacattccgatggcatacccgtacgtggagttccagagaggtctgcccatagaaatcgagccactttgctctgaatcctgacaggtttgcagttgcagccacggtgagcgagttcatcaaatcatccccgcaagcgagggggagatgcgcgcgagaacgacggactgagaggattagtcagtgaaacaaaaaaaggagagaaaatatttcaagaactgaagaaatgcactgggcattagctagtagtacctatcaatgagccaagctgagattgtaatttgctgtacatggtgtagatatattttgtccatgccgattgcttgcggtggtggtggtgcggtgcttcaccctgtaacatcctccactgtttcaactttcatctgctattctatagaagaaaaaaaaaagaagaaaattgggctattgggctattgaaaagattttggatgaagccaaagatcttcaaaaacaaatcattgaaactttgaaagagtactcctatcctttaataatatgaacatgaacatgtatggactgtactctgcactacttctcagggaatttcggagcagacaaattcgatcgtggataatccctatcaatcggagatggctggtcccgtttggattggaggaatttctgaaggaatcctttcctgcaggggaaatcttagtttcagtg

SEQ ID NO: 210 - DNA, 1116 bp, synthetic construct
  source 1..1116: mol_type = other DNA; note = Myb80 cDNA sequence - OGLUM04G15520.1
atggggcgggtgccgtgctgcgagaaggacaacgtgaagcgcgggcagtggacgcccgaggaggacaacaagctgctctcctacatcacccagtacggcacccgcaactggcgcctcatccccaagaacgccgggttgcagcggtgcgggaagagctgccggctgcggtggaccaactacctccggcccgacctcaagcacggcgagttcaccgacgccgaggagcagaccatcatcaagctccactccgtcgtcggcaacaggtggtcggtgatcgcggcgcagcttccggggcggacggacaacgacgtgaagaaccactggaacacgaagctgaagaagaaactgtccgggatgggcatcgaccccgtcacgcacaagtccttctcgcacctcatggccgagatcgccaccacgctggcgccgccgcaggtggcgcacctcgccgaggccgcgctggggtgcttcaaggacgagatgctccacctcctcaccaagaagcgcccctccgacttcccctcgcccgccgtgcacgacggcgccggcgccggcgccagcgcgtccgcgctcgccgcgccctgcttccccgccgcgccgccgcaccacccgcaggccgacgacaccatcgagcgcatcaagctgggcctgtcccgcgccatcatgagcgatccctccaccgcctccgccgccgccgccgccccctccgctcccgcggaggacaagccgtggcctccaggcgacatgtccgaggggctcgccgggatgtacgccacgtacaacccggcggcgcacgcgcacgcgcaggcccaggccgagttccggtacgacggggcctccgccgcgccgggctacgtcctcggcggcgacggcgaccagggcacgtcgatgtggagccaccagagcctgtacagcgggagctccggcaccgaggaggccaggcgggcgttgccggagaagggcaacgacagcgtcggcagcagcggcggcgacgacgacgccgcggacgacggcaaggacagcggtgggaagggggcagcctccgacatgtcgggcctgttcgcctccgactgcgtgctctgggacttgcccgacgagctcacgaatcacatggtgtag

SEQ ID NO: 211 - DNA, 1116 bp, synthetic construct; identical to SEQ ID NO: 210
  source 1..1116: mol_type = other DNA; note = Myb80 coding sequence - OGLUM04G15520.1

SEQ ID NO: 212 - protein, 371 aa, synthetic construct
  source 1..371: note = Myb80 protein sequence - OGLUM04G15520.1
MGRVPCCEKDNVKRGQWTPEEDNKLLSYITQYGTRNWRLIPKNAGLQRCGKSCRLRWTNYLRPDLKHGEFTDAEEQTIIKLHSVVGNRWSVIAAQLPGRTDNDVKNHWNTKLKKKLSGMGIDPVTHKSFSHLMAEIATTLAPPQVAHLAEAALGCFKDEMLHLLTKKRPSDFPSPAVHDGAGAGASASALAAPCFPAAPPHHPQADDTIERIKLGLSRAIMSDPSTASAAAAAPSAPAEDKPWPPGDMSEGLAGMYATYNPAAHAHAQAQAEFRYDGASAAPGYVLGGDGDQGTSMWSHQSLYSGSSGTEEARRALPEKGNDSVGSSGGDDDAADDGKDSGGKGAASDMSGLFASDCVLWDLPDELTNHMV

SEQ ID NO: 213 - DNA, 2506 bp, Oryza glumipatula
  source 1..2506: mol_type = genomic DNA; note = Myb80 genomic sequence - Oryza_glumaepatula_v1.5:4:20901294:20903799:-1
ctgcagcccatagaaatatgcattccccttgcttgtaaagatcctactaggataaaactgtgtgcagaaatgaatcgtttatctttgacagtttttttttctttttgagtctatcctcctgaacctaaggctgtaaatttgttcggacaaaggatcattactcatagcctgctatgttcacaaggttttatattactgaatactggtgtttcatcaagcagcattagtgaatagttgcagtggcagtgtggtgcagggcgtcagtgagcgagatggcgaggcgagaacgcgagcggcgccgggagcgcgcggggcttggaccgtggccgtgaggggggttgacccggcgctgcgcgggtgggcaacctgtcccgcccccccggggggaggctcacgcgttgcgcgggcgttgaattctttatgccgcccatgccgccttcgccccccgtgcgcgcgcgcgcgcgcccactcgccggcgcggcagcgcgcgcgcgcgcgcgcgggcggtcgcgaggccgcgagcctatttataacacgcggcgcggccgtgtgagcgccgcacgcacgcagcagcagcggaatctcgacggcggcgacatcatggggcgggtgccgtgctgcgagaaggacaacgtgaagcgcgggcagtggacgcccgaggaggacaacaagctgctctcctacatcacccagtacggcacccgcaactggcgcctcatccccaagaacgccggtacgttggcgcgcgcgccgccaccggtgaacgcgtggttgcagcagcggcggcgctctgaccggggtgtttgttgctggaacgttggcagggttgcagcggtgcgggaagagctgccggctgcggtggaccaactacctccggcccgacctcaagcacggcgagttcaccgacgccgaggagcagaccatcatcaagctccactccgtcgtcggcaacaggtaggcatcaacgagtggtctcgctacaccgtcttgtgatcttgggtcatttttggaggaatgtattgagcaatgcgggatggggctgtgtgtggcaaggtggtcggtgatcgcggcgcagcttccggggcggacggacaacgacgtgaagaaccactggaacacgaagctgaagaagaaactgtccgggatgggcatcgaccccgtcacgcacaagtccttctcgcacctcatggccgagatcgccaccacgctggcgccgccgcaggtggcgcacctcgccgaggccgcgctggggtgcttcaaggacgagatgctccacctcctcaccaagaagcgcccctccgacttcccctcgcccgccgtgcacgacggcgccggcgccggcgccagcgcgtccgcgctcgccgcgccctgcttccccgccgcgccgccgcaccacccgcaggccgacgacaccatcgagcgcatcaagctgggcctgtcccgcgccatcatgagcgatccctccaccgcctccgccgccgccgccgccccctccgctcccgcggaggacaagccgtggcctccaggcgacatgtccgaggggctcgccgggatgtacgccacgtacaacccggcggcgcacgcgcacgcgcaggcccaggccgagttccggtacgacggggcctccgccgcgccgggctacgtcctcggcggcgacggcgaccagggcacgtcgatgtggagccaccagagcctgtacagcgggagctccggcaccgaggaggccaggcgggcgttgccggagaagggcaacgacagcgtcggcagcagcggcggcgacgacgacgccgcggacgacggcaaggacagcggtgggaagggggcagcctccgacatgtcgggcctgttcgcctccgactgcgtgctctgggacttgcccgacgagctcacgaatcacatggtgtagctataaaacgcgggaaaactttgcacggcgaagcacgccatgatcaaagaactacacttgcagttgcagagaaagttgataatttaacccttttttttgtctatttgctttattttatacttatgaatgatgacatctgagagatcatctgagtgaatgaatgtgagtccagaatatcatcgaagcttatagtagtgctagattatcatatctctcgcagttgcaggcgggaaaaaaaagggataatgcgaagaattgctaaccatgatatggctgtaagagtgatagaaaaactagagttcgagagtacgtgccgagagagtttcttctgtgcttggaattaattaggacccttaatcacctataatctaacgtaccaaaatagaaggtaccaatgaaaaggtactaaaatagtgggccaggtactggaagtggaaggttaaaatggtaattgatttccatagttgaattgtgcggttaagggcagatgcatcatattcgtttctctgcgattaatcacgaaataaaatgcttagtgattaaccacggaagcatcgatcaggctggcaattaggcaaatcaattttcgcaggaaatcaa

SEQ ID NO: 214 - DNA, 1443 bp, synthetic construct
  source 1..1443: mol_type = other DNA; note = Dwarf11 cDNA sequence - GIOSGA014915-TA
atggtgggaggagagcttgtgctggctgctctggtgatcctgcttgctttgctgctgaccctggtgctgagccacttcctgcctttgctcctgaatcccaaggctcccaagggaagctttgggtggcctctccttggtgagacgctgaggttcctcagtcctcatgctagcaacaccctgggcagcttcctggaggatcactgctccaggtatgggagggtgtttaagtcccatctgttctgcacccccaccatagtgtcctgtgaccaggagctgaaccacttcatccttcagaatgaggagaggctgtttcagtgcagctaccccaggccaattcatggcattctgggcaagtcctccatgttagtggtcctaggggaggaccacaagaggctcaggaaccttgctctagcactggtcacctccacaaagctcaagcccagctaccttggcgacattgagaagattgcactgcatatagttgggtcatggcatggcaagagcaaggacaaggggatggtcaatgtcatcgccttctgcgaggaggcaagaaagtttgcattcagtgtaatagtgaagcaggtgctggggctatcaccagaggagccggtcactgccatgatacttgaagatttcctcgccttcatgaagggtctcatctctttccctctctacatcccagggacgccctatgccaaagctgtgcaggccagagcgaggatatcaagcactgtgaagggtattattgaggagaggaggaatgctggctccagcaacaagggtgatttccttgatgtgctgctttcaagcaatgagctctctgatgaggagaaagtgagctttgtgctggattccttactgggaggatatgagaccacctcactcttgatctccatggttgtgtatttccttgggcagtcagctcaagatctggaactagtgaagagggagcatgaaggcataagatcgaagaaagagaaggacgagttcttgagctctgaagactataagaagatggaatatacccaacatgttatcaatgaggcactgagatgtggcaacattgtcaagtttgtccacaggaaggctctcaaagatgtcagatacaaagagtatctgattccttctggttggaaggtcctacctgttttcagtgctgttcatttgaaccccttacttcatggaaatgcccaacaatttcagccctgcagatgggagggtgcaagccaagggacaagcaagaagtttacgccgttcggcggtggcccccggctctgccctggatcagagcttgcaaaagtagaggctgctttcttcctccatcaccttgtgctcaattatagatggagaatcgatggcgatgacattccgatggcatacccgtacgtggagttccagagaggtctgcccatagaaatcgagccactttgctctgaatcctga

SEQ ID NO: 215 - DNA, 1443 bp, synthetic construct; identical to SEQ ID NO: 214
  source 1..1443: mol_type = other DNA; note = Dwarf11 coding sequence - GIOSGA014915-TA

SEQ ID NO: 216 - protein, 480 aa, synthetic construct; identical to SEQ ID NO: 200
  source 1..480: note = Dwarf11 protein sequence - GIOSGA014915-TA

SEQ ID NO: 217 - DNA, 5045 bp, Oryza indica
  source 1..5045: mol_type = genomic DNA; note = Dwarf11 genomic sequence - ASM465v1:4:21874459:21879503:-1
gcaccttgagcagcagcagcagcctagatgctagctactctgcattggaccatcctcctagtcctaggctgtaggctcatagccctccttgataaaagctactactggcacagtatatgcatgcagccaattcacttcactgcagtaaaaaaaaaaagaaaacagagagaaacagagatcaaacaatgcaagaaagaaatacccctacttctactttaaaacaaggccaaagcaaggaaacaaaaggcagcctctattttttttccctcccccccctgctcatcacccctttccatcactccctccctttgcaaagatccttcctgcctttgcttctactgctatatagcctcccccctcaccttccattccagagaaaaatagagggagggagagggagagaagcagagtgttgagcacaagctagtgaaagggttagatagaaacttggtagaatagacagataggcagagagagagagagagcttagcaagctaaggcttagctgctgcaaggctccatccatgcttcttgttgtgagatgagattgagataagatgagcagggggtggtggtgcctggtgtgaggctataggtaagatggtgggaggagagcttgtgctggctgctctggtgatcctgcttgctttgctgctgaccctggtgctgagccacttcctgcctttgctcctgaatcccaaggctcccaagggaagctttgggtggcctctccttggtgagacgctgaggttcctcagtcctcatgctagcaacaccctgggcagcttcctggaggatcactgctccaggtaaattaaaatcatatgcagtaaacatttctatcagtatcaccaccacaaccacacaggagcaacaagtgtcatcttaccatgcaattaagtactgtaccattatttcatgtgacagcacaaggtaatgctgctgtcctgtcccagcagctttatcacgcccttttttttcctccctgatgaggggggtgctgtaacatgaattggacagtgtttagcatcttgttaaagagttgtgcaaaccttttcttccgatgaacaagcgagagaaaaggaatgtaaaggttgcacaacacttaactagctagcatgcatggtggtagtaacactgatgatggtgtgatgatgatgatgcaggtatgggagggtgtttaagtcccatctgttctgcacccccaccatagtgtcctgtgaccaggagctgaaccacttcatccttcagaatgaggagaggctgtttcagtgcagctaccccaggccaattcatggcattctgggcaagtcctccatgttagtggtcctaggggaggaccacaagaggctcaggaaccttgctctagcactggtcacctccacaaagctcaagcccagctaccttggcgacattgagaagattgcactgcatatagttgggtcatggcatggcaagagcaaggacaaggggatggtcaatgtcatcgccttctgcgaggaggcaagaaaggttagcaagtgtactaacttgaaaccagagccatatcaccacaaggacatgatcccttgaaacaagggagggaaaactttgcacatgttagctacataccatcatcatcatgttgttacttgctgctgcatgaatctttgtcccaaggtcactttgacttaccatggtcttttttaccttttctttttttttctctctctggtgtgctctctttccttgagaaccacagtttgcattcagtgtaatagtgaagcaggtgctggggctatcaccagaggagccggtcactgccatgatacttgaagatttcctcgccttcatgaagggtctcatctctttccctctctacatcccagggacgccctatgccaaagctgtgcaggcatgcaactcaacatctcatttacacaagtcgttaaactgtcaataaaattttcaggccattttatttttgtatacttaccataataacttcatccttttgtccgcgaatcctcacaggccagagcgaggatatcaagcactgtgaagggtattattgaggagaggaggaatgctggctccagcaacaagggtgatttccttgatgtgctgctttcaagcaatgagctctctgatgaggagaaagtgagctttgtgctggattccttactgggaggatatgagaccacctcactcttgatctccatggttgtgtatttccttgggcagtcagctcaagatctggaactagtgaaggtatacagacttctcatgctgaaaaagacagagcagtactggtaaataagtacttaattaagtggccatcaataaaatatatattaacatgtttgcatgcagagggagcatgaaggcataagatcgaagaaagagaaggacgagttcttgagctctgaagactataagaagatggaatatacccaacatgtaagatgatcgttcaatacatgctttaggattagttagtaagccaggggtacctttttttcctattatcagcaactacacaaatatgtgaccctccgaatatgaggtttactcatattcagaacgattctcctatgcctacccatatatgcaatttttgaattaagcaaaaaaaagaaaaagaaacagagagagaaagaatctcattacaatagagtgaaaagggcggaagggacatgttcttcaataatggaaactgtatgatgatgcatatgctatgcccttacaggttatcaatgaggcactgagatgtggcaacattgtcaagtttgtccacaggaaggctctcaaagatgtcagatacaaaggtaattaaccctacttgaggctttccttgaagattccattgtgctcatcacatgataatggatcaggcaaagtggatggttgcacctttattactgatttttaagcattgttattcctaaaatacctcagcttttcatagaagatgctcaaaagcaagtggctcttttttctttgctctgttgcagagtatctgattccttctggttggaaggtcctacctgttttcagtgctgttcatttgaaccccttacttcatggaaatgcccaacaatttcagccctgcagatgggaggtacgtttgtttccataatctgtgaatgctccgcaatacttactaaatgtttattgttaatgacctaatgaaaaatgttttggaccagctaggccacgaagcttagctttcacgtagtatacttttctataatacaaatttataaaatgaaaagttcagagcacctatcaagagagcttatctggagccttgaaagaatcttctttaaagggtgttctctaactaattgctacctttaattagtgagcgcccaactatgacataattactcgcaactattctggtgtcttcagatgccaaacaagctccctgtggctgcaatgccttttgtgcatggtcctaaccatgattcctctcattcaaagccagcattcttggctttgcttccttttcttagtttctgtgatgaagctaatggtctgattcatgtgtgttcctaatctgattgatgcaacagggtgcaagccaagggacaagcaagaagtttacgccgttcggcggtggcccccggctctgccctggatcagagcttgcaaaagtagaggctgctttcttcctccatcaccttgtgctcaattataggtaaaacaaaagggtatatttgtcctacccgagtagaagatgcatggatcaaagttgactggcttaaacagcaatgaacaaaatacgttcagaagtaatatttaagaagctggtgcagagtagttggtgtttaaataggccatagaaaactgttgaggcaaacatgaacaggaaaacatactgatgcagttaccactctcatactgataatacacactacactagaccactagtaagtaatggcaagaaggccatgacagcaactaggcaaattatttatgcttttgtctgtaaggaccgcaagtctgaactcagctatcttgtgcattttcataagtggcactgtagagcatagaatcagacgacaacacacagaacaaacatgacagcatggagttttcgataggtaggctatgcaagttgagttgagggctgccatacaagataaaatatactaccacgatatgatcaaactcttttttttaaaaaaaaaactaggttcattagcaacaatctatacgtgacaactgacaagaacaggcagatttatgtaaattatgcggttgtttcagagtagagtctacatgtacttactgaatatccatgccagagaaaggctgatcatcgttcttcgtttctttcgtttcttgaaaacctgtgcagatggagaatcgatggcgatgacattccgatggcatacccgtacgtggagttccagagaggtctgcccatagaaatcgagccactttgctctgaatcctgacaggtttgcagttgcagccacggtgagcgagttcatcaaatcatccccgcaagcgagggggagatgcgggcgagaacgacggactgagaggattagtcagtgaaacaaaaaaaaggagagaaaatatttcaagaactgaagaatgcactgagcattagctagtagtacctatcaatgagccaagctgagattgtaatttgctgtacatggtgtagatatattttgtccatgccgattgcttgcggtggtggtggtgcggtgcttcaccctgtaacatcctccactgtttcaactttcatctgctattctatagaagaaaaaaaaaagaagaaaattgggctattgggctattgaaaagattttggatgaagccaaagatcttcaaaaacaaatcattgaaactttgaaagagtactcctatcctttaataatatgaacatgaacatgaacatgtatggactgtactctgcactacttctcagggaatttcggagcagacaaattcgatcgtggataatccctatcaatcggagatggctggtcccgtttggattggaggaatttctgaaggaatcctttcctgcaggggaaatcttagtt

SEQ ID NO: 218 - DNA, 2310 bp, synthetic construct
  source 1..2310: mol_type = other DNA; note = Myb80 cDNA sequence - BGIOSGA030830-TA
atggcggtgcaccactccctcgaggtggccgccgcaggaggcgacggcggcggcggccgatgctacgacgacgacggccacccggcacgcaccgggacggtgtggacgtgcgtggcgcacatcatcacggcggtgatcgggtccggggtgctgtcgctggcgtggagcgtggcgaagctggggtgggtggggggaccggcctgcatggcctgcttcgcgctcgtcacctacgtctccgccgcgctgctctccgactgctaccgccgcggcgacgacgacaagggcccccggagccgatcctacatggacgccgtccgcgccttcctcggcaagaagcacacctgggcctgcggcttgctccagtacgcgagcctgtacggctgcggcgtcgcgtataccatcaccaccgccactagcatgagggcgatcctgaggtccaactgctaccacacgcacggccacgacgcgccctgcaaatacgggggtagctactacatgctcatgttcggcgcggcgcagctgttcctctccttcataccggacttccacgacatggcgtggctgtcggtcctcgccgcggtcatgtcgttctcctactcgttcatcggcctcggcctcggcctcgccaacacaattgctaatggaacgatcaaaggaagcataacaggtgctccaacgagaacccctgtgcagaaggtctggcacgtctcgcaggccatcggcgacatcgcattcgcgtacccgtactcattaatcctcttggaaattcaggacacactgaaggctccaccggccgagaacaagacgatgaagaaggcgtccatcatctcgatcgtcgtcaccaccttcttctacctctgctgcggctgcttcggctacccgccttcgggagcgacgccctggcaacctcctcaccggcttcggcttctacgagccctactggctcatcgannnnnnnnnnnnnnnnnnnnnnnnnnnnnnnnnnnnnnnnnnnnnnnnnncgcgcgcccactcgccggcgcggcagcgcgcgcgcgcgcgcgcgggcggtcgcgaggccgcgagcctatttataacacgcggcgcggccgtgtgagcgccgcacgcacgcagcagcagcggaatctcgacggcggcgacatcatggggcgggtgccgtgctgcgaaaaggacaacgtgaagcgcgggcagtggacgcccgaggaggacaacaagctgctctcctacatcacccagtacggcacccgcaactggcgcctcatccccaagaacgccgcacgcgtgcggcgctctgaccggggtgtttgttgctggaacgttggcaggttgcagcggtgcgggaagagctgccggctgcggtggaccaactacctccggcccgacctcaagcacggcgagttcaccgacgccgaggagcagaccatcatcaagctccactccgtcgtcggcaacaggtggtcggtgatcgcggcgcagcttccggggcggacggacaacgacgtgaagaaccactggaacacgaagctgaagaagaagctgtccgggatgggcatcgaccccgtcacgcacaagtccttctcgcacctcatggccgagatcgccaccacgctggcgccgccgcaggtggcgcacctcgccgaggccgcgctggggtgcttcaaggacgagatgctccacctcctcaccaagaagcgcccctccgacttcccctcgcccgccgtgcacgacggcgccggcgccggcgccagcgcgtccgcgctcgccgcgccctgtttccccgccgcgccgccgcaccacccgcaggccgacgacaccatcgagcgcatcaagctcggcctgtcccgcgccatcatgagcgatccctccaccgcctccgccgccgccgccgccgccgcgccctccgcccccgcggaggacaagccgtggccgcccggcgacatgtccgaggggctcgccgggatgtacgccacgtacaacccggcggcgcacgcgcacgcgcaggcccaggccgagttccggtacgacggggcctccgcggcgcagggctacgtcctcggcggcgacggcgaccagggcacgtcgatgtggagccaccagagcctgtacagcgggagctccggcaccgaggaggccaggcgggcgttgccggagaagggcaacgacagcgtcggcagcagcggcggcgacgacgacgccgcggacgacggcaaggacagcgggaagggggcagcctccgacatgtcgggcctgttcgcctccgactgcgtgctctgggacttgcccgacgagctcacgaatcacatggtgtag

SEQ ID NO: 219 - DNA, 2310 bp, synthetic construct; identical to SEQ ID NO: 218
  source 1..2310: mol_type = other DNA; note = Myb80 coding sequence - BGIOSGA030830-TA

SEQ ID NO: 220 - protein, 769 aa, synthetic construct
  source 1..769: note = Myb80 protein sequence - BGIOSGA030830-TA
MAVHHSLEVAAAGGDGGGGRCYDDDGHPARTGTVWTCVAHIITAVIGSGVLSLAWSVAKLGWVGGPACMACFALVTYVSAALLSDCYRRGDDDKGPRSRSYMDAVRAFLGKKHTWACGLLQYASLYGCGVAYTITTATSMRAILRSNCYHTHGHDAPCKYGGSYYMLMFGAAQLFLSFIPDFHDMAWLSVLAAVMSFSYSFIGLGLGLANTIANGTIKGSITGAPTRTPVQKVWHVSQAIGDIAFAYPYSLILLEIQDTLKAPPAENKTMKKASIISIVVTTFFYLCCGCFGYPPSGATPWQPPHRLRLLRALLAHRXXXXXXXXXXXXXXXXXARPLAGAAARARARGRSRGREPIYNTRRGRVSAARTQQQRNLDGGDIMGRVPCCEKDNVKRGQWTPEEDNKLLSYITQYGTRNWRLIPKNAARVRRSDRGVCCWNVGRLQRCGKSCRLRWTNYLRPDLKHGEFTDAEEQTIIKLHSVVGNRWSVIAAQLPGRTDNDVKNHWNTKLKKKLSGMGIDPVTHKSFSHLMAEIATTLAPPQVAHLAEAALGCFKDEMLHLLTKKRPSDFPSPAVHDGAGAGASASALAAPCFPAAPPHHPQADDTIERIKLGLSRAIMSDPSTASAAAAAAAPSAPAEDKPWPPGDMSEGLAGMYATYNPAAHAHAQAQAEFRYDGASAAQGYVLGGDGDQGTSMWSHQSLYSGSSGTEEARRALPEKGNDSVGSSGGDDDAADDGKDSGKGAASDMSGLFASDCVLWDLPDELTNHMV

SEQ ID NO: 221 - DNA, 4378 bp, Oryza indica
  source 1..4378: mol_type = genomic DNA; note = Myb80 genomic sequence - ASM465v1:9:14727035:14731412:1
ttggtgccaaattggcaattaggcttgcgcatgcagtttcgtgcaggaggcagagcaaatctcgtgacaaatgaatgctgaatcgtgcactccgtgcactcgtggacgggggcccgtcggcatgtcnnnnnnnnnnnnnnnnnnnnnnnnnnnnnnnnnnnnnnnnnnnnnnnnnnnnnnnnnnnnnnnnnnnnnnnnnnnnnnnnnnnnnnnnnnnnnnnnnnnntcggaagactgtgtacctcaacccggatatcctggttattaatccattccaaaccttagtaaaacagcgatatactactaataatatgtgtagggtgtcgaggcagccgcgcttttcgccccgaaaaaaggggggtcgcggattcgatccgagtccaagagaatcagacaaagccgtgacagcaacggcctagtgatccaaagctaagtagtcgtagtagtcgtagccatcggcgcggtggtctcatcagaagcggatcgctcgatcgatcgccttatacctccacgtctcgccgtccgtctccaaccccaaccccacccactgatcctgcagctagctagcctcttctcccgtcgcgcggcgaaccaggcgcaatggcggtgcaccactccctcgaggtggccgccgcaggaggcgacggcggcggcggccgatgctacgacgacgacggccacccggcacgcaccggtacggtacacacacgctcgttgtacgtcgtacgtcgttgttccctgaacccagcgcgctgatctgaatccatccatgcgcgcgcggggcgaatggtgtggcgggcgtgcgtgcagggacggtgtggacgtgcgtggcgcacatcatcacggcggtgatcgggtccggggtgctgtcgctggcgtggagcgtggcgaagctggggtgggtggggggaccggcctgcatggcctgcttcgcgctcgtcacctacgtctccgccgcgctgctctccgactgctaccgccgcggcgacgacgacaagggcccccggagccgatcctacatggacgccgtccgcgccttcctcggtaaccaacacacaacacacaaaatcaaaagctagctagcgatttacgacgacgcaaaccaaaccgaacttcgcgttagcgaattcgtggctaaattctgtatactctgtctctgtgtgtgcacatggcgcggcgaattaacgtgctcaggcaagaagcacacctgggcctgcggcttgctccagtacgcgagcctgtacggctgcggcgtcgcgtataccatcaccaccgccactagcatgaggtagtagcagctagcccaagaatcgatgtgcagggagaaacgtgatggatgatgcattatgagttttgcagcgtggtgtttctgtttctgtttctgtttctgtttcttccgttgatttttttcttcgggttttggtgtgttttttgcagggcgatcctgaggtccaactgctaccacacgcacggccacgacgcgccctgcaaatacgggggtagctactacatgctcatgttcggcgcggcgcagctgttcctctccttcataccggacttccacgacatggcgtggctgtcggtcctcgccgcggtcatgtcgttctcctactcgttcatcggcctcggcctcggcctcgccaacacaattggtactctttgctttggtttcagaatccaatctgttcatcctttgaggctttgagctgctcagtcgtagtactagtgcatttacatgttctgtgagactagatggtctgataaattggttctgaacgatgcgcactgcaactaaacatgtagtatgtgaacattgagattatgtaaagttgacaaacctgttgctgttcttcagctaatggaacgatcaaaggaagcataacaggtgctccaacgagaacccctgtgcagaaggtctggcacgtctcgcaggccatcggcgacatcgcattcgcgtacccgtactcattaatcctcttggaaattcaggtgcacacataggagtacatctcatcgatctgaaagtctgaagcctgaagtacaacagtacagtcgctgacgaatttcttccgttacggtctgtgtttgtgcaggacacactgaaggctccaccggccgagaacaagacgatgaagaaggcgtccatcatctcgatcgtcgtcaccaccttcttctacctctgctgcggctgcttcggctacccgccttcgggagcgacgccctggcaacctcctcaccggcttcggcttctacgagccctactggctcatcgannnnnnnnnnnnnnnnnnnnnnnnnnnnnnnnnnnnnnnnnnnnnnnnnncgcgcgcccactcgccggcgcggcagcgcgcgcgcgcgcgcgcgggcggtcgcgaggccgcgagcctatttataacacgcggcgcggccgtgtgagcgccgcacgcacgcagcagcagcggaatctcgacggcggcgacatcatggggcgggtgccgtgctgcgaaaaggacaacgtgaagcgcgggcagtggacgcccgaggaggacaacaagctgctctcctacatcacccagtacggcacccgcaactggcgcctcatccccaagaacgccggtacgttggctgctgcgctgccgccaccggcgaacgcgtggttgcagcacgcgtgcggcgctctgaccggggtgtttgttgctggaacgttggcaggttgcagcggtgcgggaagagctgccggctgcggtggaccaactacctccggcccgacctcaagcacggcgagttcaccgacgccgaggagcagaccatcatcaagctccactccgtcgtcggcaacaggtaggcatcaacgagtggtctcgctacaccgtcttgtgatcttgggtcatttttggaggaatgtattgagcaatgcgggatggggctgtgtgtggcaaggtggtcggtgatcgcggcgcagcttccggggcggacggacaacgacgtgaagaaccactggaacacgaagctgaagaagaagctgtccgggatgggcatcgaccccgtcacgcacaagtccttctcgcacctcatggccgagatcgccaccacgctggcgccgccgcaggtggcgcacctcgccgaggccgcgctggggtgcttcaaggacgagatgctccacctcctcaccaagaagcgcccctccgacttcccctcgcccgccgtgcacgacggcgccggcgccggcgccagcgcgtccgcgctcgccgcgccctgtttccccgccgcgccgccgcaccacccgcaggccgacgacaccatcgagcgcatcaagctcggcctgtcccgcgccatcatgagcgatccctccaccgcctccgccgccgccgccgccgccgcgccctccgcccccgcggaggacaagccgtggccgcccggcgacatgtccgaggggctcgccgggatgtacgccacgtacaacccggcggcgcacgcgcacgcgcaggcccaggccgagttccggtacgacggggcctccgcggcgcagggctacgtcctcggcggcgacggcgaccagggcacgtcgatgtggagccaccagagcctgtacagcgggagctccggcaccgaggaggccaggcgggcgttgccggagaagggcaacgacagcgtcggcagcagcggcggcgacgacgacgccgcggacgacggcaaggacagcgggaagggggcagcctccgacatgtcgggcctgttcgcctccgactgcgtgctctgggacttgcccgacgagctcacgaatcacatggtgtagctaagctataaaacgcgggaaaacttagcacggcgaagcacgccatgatccacatcacttgcagttgcaggtggtgagaattggatagagcgaaaaattgctaccaataatattgctgaaagagtgacagaaaaagtgaaaaactatagtatgtagctggcaagaaaaatggggattctttttgcttggaaaagagaaaaaaaaattgagatgtgaatagttttaccgagaagcactgattgattgagtgattgagccggaggccaaggtatttttccagtcctctgcttcagtcgcactccatgagcaatggataattcaattcagttcagacagattgtttacttcttccatggatcatattgtctgatgatgaggttgatgggaaaacgtcaatatgcaactctagcatgttatataaatggtcatgaaaattcagagaaaaaaaaatctataacaacgctgcacccaaaaagattgtgtgctgtctaaacttcagaaaatcatgtgaaatttctgaattttaaccatgagttgcacaactgtaccaaagaaggctagaacccagaaataaaacctgtggatctgacattttgatag

SEQ ID NO: 222 - DNA, 1110 bp, synthetic construct
  source 1..1110: mol_type = other DNA; note = Myb80 cDNA sequence - BGIOSGA014912-TA
atggggcgggtgccgtgctgcgagaaggacaacgtgaagcgcgggcagtggacgcccgaggaggacaacaagctgctctcctacatcacccagtacggcacccgcaactggcgcctcatccccaagaacgccgggttgcagcggtgcgggaagagctgccggctgcggtggaccaactacctccggcccgacctcaagcacggcgagttcaccgacgccgaggagcagaccatcatcaagctccactccgtcgtcggcaacaggtggtcggtgatcgcggcgcagcttccggggcggacggacaacgacgtgaagaaccactggaacacgaagctgaagaagaagctgtccgggatgggcatcgaccccgtcacgcacaagtccttctcgcacctcatggccgagatcgccaccacgctggcgccgccgcaggtggcgcacctcgccgaggccgcgctggggtgcttcaaggacgagatgctccacctcctcaccaagaagcgcccctccgacttcccctcgcccgccgtgcacgacggcgccggcgccggcgccagcgcgtccgcgctcgccgcgccctgcttccccgccgcgccgccgcaccacccgcaggccgacgacaccatcgagcgcatcaagctcggcctgtcccgcgccatcatgagcgatccctccaccgcctccgccgccgccgcgccctccgcccccgcggaggacaagccgtggccgcccggcgacatgtccgaggggctcgccgggatgtacgccacgtacaacccggcggcgcacgcgcacgcgcaggcccaggccgagttccggtacgacggggcctccgcggcgcagggctacgtcctcggcggcgacggcgaccagggcacgtcgatgtggagccaccagagcctgtacagcgggagctccggcaccgaggaggccaggcgggcgttgccggagaagggcaacgacagcgtcggcagcagcggcggcgacgacgacgccgcggacgacggcaaggacagcgggaagggggcagcctccgacatgtcgggcctgttcgcctccgactgcgtgctctgggacttgcccgacgagctcacgaatcacatggtgtag

SEQ ID NO: 223 - DNA, 1110 bp, synthetic construct; identical to SEQ ID NO: 222
  source 1..1110: mol_type = other DNA; note = Myb80 coding sequence - BGIOSGA014912-TA

SEQ ID NO: 224 - protein, 369 aa, synthetic construct
  source 1..369: note = Myb80 protein sequence - BGIOSGA014912-TA
MGRVPCCEKDNVKRGQWTPEEDNKLLSYITQYGTRNWRLIPKNAGLQRCGKSCRLRWTNYLRPDLKHGEFTDAEEQTIIKLHSVVGNRWSVIAAQLPGRTDNDVKNHWNTKLKKKLSGMGIDPVTHKSFSHLMAEIATTLAPPQVAHLAEAALGCFKDEMLHLLTKKRPSDFPSPAVHDGAGAGASASALAAPCFPAAPPHHPQADDTIERIKLGLSRAIMSDPSTASAAAAPSAPAEDKPWPPGDMSEGLAGMYATYNPAAHAHAQAQAEFRYDGASAAQGYVLGGDGDQGTSMWSHQSLYSGSSGTEEARRALPEKGNDSVGSSGGDDDAADDGKDSGKGAASDMSGLFASDCVLWDLPDELTNHMV

SEQ ID NO: 225 - DNA, 2500 bp, Oryza indica
  source 1..2500: mol_type = genomic DNA; note = Myb80 genomic sequence - ASM465v1:4:21914917:21917416:-1
atagtgctgcagcccatagaaatatgcattccccttgcttgtaaagatcctactaggataaaactgtgtgcagaaatgaatcgtttatctttgacagtgtttttttttctttttgagtctatcctcctgaacctaaggctgtagatttgttcggacaaaggatcattactcatagcctgctatgttcacaaggttttatattactgaatagtggtgtttcatcaagcagcattagtgaatagttgcagtggcagtgtggtgcagggcgtcagtgagcgagatggcgaggcgagaacgcgagcggcgccgggagcgcgcggggcttggaccgtggccgtgaggggggttgacccggcgctgcgcgggtgggcaacctgtcccgcccccccggggggaggctcacgcgttgcgcgggcgttgaattctttatgccgcccatgccgccttcgccccccgtgcgcgcgcgcgcgcgcccactcgccggcgcggcagcgcgcgcgcgggcggtcgcgaggccgcgagcctatttataacacgcggcgcggccgtgtgagcgccgcacgcacgcagcagcagcggaatctcgacggcggcgacatcatggggcgggtgccgtgctgcgagaaggacaacgtgaagcgcgggcagtggacgcccgaggaggacaacaagctgctctcctacatcacccagtacggcacccgcaactggcgcctcatccccaagaacgccggtacgttggcgcgcgcgccgccaccggcgaacgcgtggttgcagcagcggcggcgctctgaccggggtgtttgttgctggaacgttggcagggttgcagcggtgcgggaagagctgccggctgcggtggaccaactacctccggcccgacctcaagcacggcgagttcaccgacgccgaggagcagaccatcatcaagctccactccgtcgtcggcaacaggtaggcatcaacgagtggtctcgctacaccgtcttgtgatcttgggtcatttttggaggaatgtattgagcaatgcgggatggggctgtgtgtggcaaggtggtcggtgatcgcggcgcagcttccggggcggacggacaacgacgtgaagaaccactggaacacgaagctgaagaagaagctgtccgggatgggcatcgaccccgtcacgcacaagtccttctcgcacctcatggccgagatcgccaccacgctggcgccgccgcaggtggcgcacctcgccgaggccgcgctggggtgcttcaaggacgagatgctccacctcctcaccaagaagcgcccctccgacttcccctcgcccgccgtgcacgacggcgccggcgccggcgccagcgcgtccgcgctcgccgcgccctgcttccccgccgcgccgccgcaccacccgcaggccgacgacaccatcgagcgcatcaagctcggcctgtcccgcgccatcatgagcgatccctccaccgcctccgccgccgccgcgccctccgcccccgcggaggacaagccgtggccgcccggcgacatgtccgaggggctcgccgggatgtacgccacgtacaacccggcggcgcacgcgcacgcgcaggcccaggccgagttccggtacgacggggcctccgcggcgcagggctacgtcctcggcggcgacggcgaccagggcacgtcgatgtggagccaccagagcctgtacagcgggagctccggcaccgaggaggccaggcgggcgttgccggagaagggcaacgacagcgtcggcagcagcggcggcgacgacgacgccgcggacgacggcaaggacagcgggaagggggcagcctccgacatgtcgggcctgttcgcctccgactgcgtgctctgggacttgcccgacgagctcacgaatcacatggtgtagctaagctataaaacgcgggaaaacttagcacggcgaagcacgccatgatccacatcacttgcagttgcggtggtgagaattggatagagcgaaaaattgctaccaataatattgctgaaggagtgacagaaaaagtgaaaaactatagtatgtagctggcaagaaaaatggggattctttttgcttggaaaagagaaaaaaaaattgagatgtgaatagttttacctgagaagcactgattgattgagtgattgagccggaggccaaggtatttttccagtcctctgcttcagtcgcactccatgagcaatggataattcaattcagttcagacagattgtttacttcttccatggatcatattgtctgatgatgaggttgatgggaaaacgtcaatatgcaactctagcatgttatataaatggtcatgaaaattcagagaaaaaaaaatctataacaacgctgcacccaaaaagattgtgtgctgtctaaacttcagaaaatcatgtgaaatttctgaattttaaccatgagttgcacaactgtaccaaagaaggctagaacccagaaataaaacctgtggatctgacattttgatag

SEQ ID NO: 226 - DNA, 1407 bp, synthetic construct
  source 1..1407: mol_type = other DNA; note = Dwarf11 cDNA sequence - KN538714.1_FGT040
atggtgggaggagagcttgtgctggctgctctggtgatcctgcttgccttgctcctgaccctggtgctgagccacttcctgcctttgctcctgaatcccaaggctcccaagggaagctttgggtggcctctccttggtgagacgctgaggttcctcagtcctcatgctagcaacaccctgggcagcttcctggaggatcactgctccaggtatgggagggtgtttaagtcccatctgttctgcacccccaccatagtgtcctgtgaccaggagctgaaccacttcatccttcagaatgaggagaggctgtttcagtgcagctaccccaggccaattcatggcattctgggcaagtcctccatgttagtggtcctaggggaggaccacaagaggctcaggaaccttgctctagcactggtcacctccacaaagctcaagcccagctaccttggcgacattgagaagattgcactgcatatagttgggtcatggcatggcaagagcaaggacaaggggatggtcaatgtcatcgccttctgcgaggaggcaagaaaggccagagcgaggatatcaagcactgtgaagggtattattgaggagaggaggaatgctggctccagcaacaagggcgatttccttgatgtgctgctttcaagcaatgagctctctgatgaggagaaagtgagctttgtgctggattccttactgggaggatatgagaccacctcactcttgatctccatggttgtgtatttccttgggcagtcagctcaagatctggaactagtgaagagggagcatgaaggcataagatcgaagaaagagaaggacgagttcttgagctctgaagactataagaagatggaatatacccaacatgttatcaatgaggcactgagatgtggcaacattgtcaagtttgtccacaggaaggctctcaaagatgtcagatacaaagagtatctgattccttctggttggaaggtcctacctgttttcagtgctgttcatttgaaccccttacttcatggaaatgcccaacaatttcagccctgcagatgggagatgccaaacaagctccctgtggctgcaatgccttttgtgcatggtcctaaccatgattcctctcattcaaagccagcattcttggctttgcttccttttcttagtttctgtgatgaagctaatggtctgattcatggtgcaagccaagggacaagcaagaagtttacgccgttcggcggtggcccccggctctgccctggatcagagcttgccaaagtagaggctgctttcttcctccatcaccttgtgctcaattatagatggagaatcgatggcgatgacattccgatggcatacccgtacgcggagttccagagaggtttgcagttgcagccacggtga

SEQ ID NO: 227 - DNA, 1407 bp, synthetic construct; identical to SEQ ID NO: 226
  source 1..1407: mol_type = other DNA; note = Dwarf11 coding sequence - KN538714.1_FGT040

SEQ ID NO: 228 - protein, 468 aa, synthetic construct
  source 1..468: note = Dwarf11 protein sequence - KN538714.1_FGT040
MVGGELVLAALVILLALLLTLVLSHFLPLLLNPKAPKGSFGWPLLGETLRFLSPHASNTLGSFLEDHCSRYGRVFKSHLFCTPTIVSCDQELNHFILQNEERLFQCSYPRPIHGILGKSSMLVVLGEDHKRLRNLALALVTSTKLKPSYLGDIEKIALHIVGSWHGKSKDKGMVNVIAFCEEARKARARISSTVKGIIEERRNAGSSNKGDFLDVLLSSNELSDEEKVSFVLDSLLGGYETTSLLISMVVYFLGQSAQDLELVKREHEGIRSKKEKDEFLSSEDYKKMEYTQHVINEALRCGNIVKFVHRKALKDVRYKEYLIPSGWKVLPVFSAVHLNPLLHGNAQQFQPCRWEMPNKLPVAAMPFVHGPNHDSSHSKPAFLALLPFLSFCDEANGLIHGASQGTSKKFTPFGGGPRLCPGSELAKVEAAFFLHHLVLNYRWRIDGDDIPMAYPYAEFQRGLQLQPR

SEQ ID NO: 229 - DNA, 5067 bp, Oryza longistaminata
  source 1..5067: mol_type = genomic DNA; note = Dwarf11 genomic sequence - O_longistaminata_v1.0:KN538714.1:251095:256161:-1
tgactgcaccttgagcagcagcagcagcctagatgctaggtactctgcattggaccatcctcctagtcctaggctgtagtaggctcatagccctccttgataaaagctactactggcacagtatatgcatgcagccaattcacttcactgcagtaaaaaaaaaaaaagaaaacagagagaaacagagatcaaacaatgcaagaaagaaatacccctacttctactttaaaacaaggccaaagcaaggaaacaaaaggcagcctctattttttttccctccccccctgctcatcacccctttccatcactccctccctttgcaaagatccttcctgcctttgcttctactgctatatagcctcccccctcaccttccattccagagaaaaatagagggagaagcagaggagtgttgagcacaagctagtgtaagggttagatagaaacttggtactagacagataggcagagagagagagagagagcttagcaagccaaggcttagctgctgcaaggctccatccatgcttcttgttgtgagatgagattgagataagatgagcagggggtggtggtgcctggtgtgaggctataggtaagatggtgggaggagagcttgtgctggctgctctggtgatcctgcttgccttgctcctgaccctggtgctgagccacttcctgcctttgctcctgaatcccaaggctcccaagggaagctttgggtggcctctccttggtgagacgctgaggttcctcagtcctcatgctagcaacaccctgggcagcttcctggaggatcactgctccaggtaaattaaaatcatatgcagtaaacatttctatcagtatcaccaccaccaccacacaggagcaacaagtgtcatcttaccatgcaattaagtactgtaccattatttcatgtgacagcaaaaggtaatgctgctgtcctgtcccagcagctttatcacgcccttttttcttcctccctgatgagggggtgctgtaacatgaattggacagtgtttagcatcttgttaaagagttgtgcaaaccttttcttccgatgaacaagtgagagaaaaggaatgtaaaggttgcacaacacttaactagctagcatgcatggtggtagtaacactgatgatggtgcgatgatgatgatgcaggtatgggagggtgtttaagtcccatctgttctgcacccccaccatagtgtcctgtgaccaggagctgaaccacttcatccttcagaatgaggagaggctgtttcagtgcagctaccccaggccaattcatggcattctgggcaagtcctccatgttagtggtcctaggggaggaccacaagaggctcaggaaccttgctctagcactggtcacctccacaaagctcaagcccagctaccttggcgacattgagaagattgcactgcatatagttgggtcatggcatggcaagagcaaggacaaggggatggtcaatgtcatcgccttctgcgaggaggcaagaaaggttagcaagtgtacaaacttgaaaccagagccatatcaccacaaggacatgatcccttgaaacaagggagggaaaactttgcacatgttagctacataccatcatcatcatgttgttacttgctgctgcatgaatctttgtcccaaggtcactttgacttaccatggtcttttttaccttttcttttttttttctctctctctctggtgtgctctctttccttgagaaccacagtttgcattcagtgtaatagtgaagcaggtgctggggctatcaccagaggagccggtcactgccatgatacttgaagatttcctcgccttcatgaagggtctcatctctttccctctctacatcccagggacaccatatgccaaagctgtgcaggcatgcaactcaacatctcatttacacaagtcattaaactgtcaataaaattttcaggccattttatttttgtatacttaccataataacttcatccttttgtccgcgaatcctcacaggccagagcgaggatatcaagcactgtgaagggtattattgaggagaggaggaatgctggctccagcaacaagggcgatttccttgatgtgctgctttcaagcaatgagctctctgatgaggagaaagtgagctttgtgctggattccttactgggaggatatgagaccacctcactcttgatctccatggttgtgtatttccttgggcagtcagctcaagatctggaactagtgaaggtatacagacttctcatgctgaaaaagacagagcagtactggtaaataagtacttaattaagtggccatcaataaaatatatattaacatgtttgcatgcagagggagcatgaaggcataagatcgaagaaagagaaggacgagttcttgagctctgaagactataagaagatggaatatacccaacatgtaagatgatcgttcaatacatgctttaggattggttagtaagccaggggtacctttttttcctattatcagcaactacacaaatatgtgaccctccaaatatgaggtttactcatattcagaccgattctcctatgcctacccatatatgcaatttttgaattaagcaaaaaaagaaaaagaaacagagagagaacgaatctcattgcaatagagtgaaaagggcagaaggggcatgttcttcaataatggaaactgtatgatgatgcatatgctatgcccttacaggttatcaatgaggcactgagatgtggcaacattgtcaagtttgtccacaggaaggctctcaaagatgtcagatacaaaggtaattaaccctacttgaggctttccttgaagattccattgtgctcatcacatgataatggatcaggcaaagtggatggttgcacctttattactgatttttaagcattgttattcctaaaatacctcagcttttcatagaagatgctcaaaagcaagtggctcttttttctttgctctgttgcagagtatctgattccttctggttggaaggtcctacctgttttcagtgctgttcatttgaaccccttacttcatggaaatgcccaacaatttcagccctgcagatgggaggtacgtttgtttccataatctgtgaatactccgcaatacttgctaaatgtttattgttaatgacctaatgaaaaatgttttggaccagctaggccacgaagcttagctttcacgtagtatacttttctataatacaaatttataaaatgaaaagttcagagcacctatcaagagagcttatctggagccttgaaagaatcttctttaaagggtgttctctaactaattgctacctttaattagtgagcgtccaactatgacataattacttgcaactactctggtgtcttcagatgccaaacaagctccctgtggctgcaatgccttttgtgcatggtcctaaccatgattcctctcattcaaagccagcattcttggctttgcttccttttcttagtttctgtgatgaagctaatggtctgattcatgtgtgctcctaatctgattgatgcaacagggtgcaagccaagggacaagcaagaagtttacgccgttcggcggtggcccccggctctgccctggatcagagcttgccaaagtagaggctgctttcttcctccatcaccttgtgctcaattataggtaaaacaaaagggtatatttgtcctacccgagtagaagatgcatggatcaaagttgactggcttaaacagcaatgaacaaaatacgttcagaagtaatatttaagaagctggtgcagagtagttggtgtttaaataggccatagaaaactgttgaggcaaacatgaacaggaaaacatactgatgcagttaccactctcatactgataatacacactacactagaccactagtaagtaatggcaagaaggccatgacagcaactaggcaaattatttatgcttttgtctgtaaggaccgcaagtctgaactcagctatcttgtgcattttcataagtggcactgtagagcatagaatcagacgacaacacacagaacaaacatgacagcatggagttttcgataggtaggctatgcaagttgagttgagggctgccatacaagataaaatatacttgcacgatatgatcaaactctttttttttttaaaaaaaaataggttcattagcaacaatctatacgtgacaactgacaagaacaggcagatttatgtaaattatgcggttgtttcagagtacagtctacatgtacttactgaatatccatgccagtgaaaggctgatcatcgttcttcgtttcttgaaaacctgtgcagatggagaatcgatggcgatgacattccgatggcatacccgtacgcggagttccagagaggtctgcccatagaaatcgagccactttgctctgaatcctgacaggtttgcagttgcagccacggtgagcgagttcatcaaatcatccccgcaagcgagggggagatgcgcgcgagaacgacggactgagaggattagtcagtgaaacaaaaaaaggagagaaaatatttcaagaactgaagaaatgcactgggaaactagctagtagtacctatcaatgagccaagctgagattgtaatttgctgtacatggtgtagatatattttgtccatgccgattgcttgcggtggtggtggtggtgcggtgcttcaccctgtaacatcctccactgtttcaactttcatctgctattctatagaagaaaaaaaaaagaagaaaattgggctattgaaaagattttggatgaagccaaagatcttcaaaaacaaatcattgaaactttgaaagagtactcctatcctttaataatatgaacatgaacatgtatggactgtaccctgcactacttctcagggaattccggagcagacaaattcgatcgtggataatccctatcaatcggagatggctggtcccgtttggattggaggaatttctcaaggaatcctttcctacaggggaaatcttagtttcagtgtttctggactgaaggaaaaaaaaaaaaacc

SEQ ID NO: 230 - DNA, 1218 bp, synthetic construct
  source 1..1218: mol_type = other DNA; note = Myb80 cDNA sequence - KN538714.1_FGT046
atggggcgggtgccgtgctgcgagaaggacaacgtgaagcgcgggcagtggacgcccgaggaggacaacaagctgctctcctacatcacccagtggtcggtgatcgcggcgcagctgccggggcggacggacaacgacgtgaagaaccactggaacacgaagctgaagaagaagctgtccgggatgggcatcgaccccgtcacgcacaagtccttctcgcacctcatggccgagatcgccaccacgctggcgccgccgcaggtggcgcacctcgccgaggccgcgctggggtgcttcaaggacgagatgctccacctcctcaccaagaagcgcccctccgacttcccctcgcccgccctttccatctccaccggcagagtgcgtgttggtgctaaagtttcaacaaaatgtgcaaatgggaccactcaggttgatgagttaaactttagatcaaatcaaactgaggaattagtagaagcagatgaagacactagtacccagaagaggagtgcaaaaatccatgatttttgctttgggatcccttttgggctcgccacgctctttcttggtaccctcagtctaaaattctggaggagtggaaaatccagtttcatatttatcttgggccaagcagcaatttcagctgtcctagcatggaagtattcccatgcctacatcttgacaaatagaatcctcccctgggccttctatgcatctctgaggtttctgatgaagctgaacaacgagacggtcaccatcgagctcaagaacggcaccgtcgtccacggaaccatcatcggtgtggatataagcatgaacacccacttgaagactgttaagctcacattgaaagggaaaaatcctgtaacccttgaccacctcagtgtgagaggaaacaacattcgctattacatcctccctgatagcttaaatctggaaactttactagtagaggataccccgagagtcaaggctaagaagccaactgcagggcgtgcggcttgggctgtccggcgagagaggggtgcagcagtgcagtggagaggcatgtgcaagctcaagttcaacagggagagggtggggtgctacctgctggtgatcctggtggtggccctcctcatcggcgtcctcttcggcctcggcgtcttccgccacggctacgagcgcttcaaggacctcggccgcaaccacacctgctacgactgcaacaccggctga

SEQ ID NO: 231 - DNA, 1218 bp, synthetic construct; identical to SEQ ID NO: 230
  source 1..1218: mol_type = other DNA; note = Myb80 coding sequence - KN538714.1_FGT046

SEQ ID NO: 232 - protein, 405 aa, synthetic construct
  source 1..405: note = Myb80 protein sequence - KN538714.1_FGT046
MGRVPCCEKDNVKRGQWTPEEDNKLLSYITQWSVIAAQLPGRTDNDVKNHWNTKLKKKLSGMGIDPVTHKSFSHLMAEIATTLAPPQVAHLAEAALGCFKDEMLHLLTKKRPSDFPSPALSISTGRVRVGAKVSTKCANGTTQVDELNFRSNQTEELVEADEDTSTQKRSAKIHDFCFGIPFGLATLFLGTLSLKFWRSGKSSFIFILGQAAISAVLAWKYSHAYILTNRILPWAFYASLRFLMKLNNETVTIELKNGTVVHGTIIGVDISMNTHLKTVKLTLKGKNPVTLDHLSVRGNNIRYYILPDSLNLETLLVEDTPRVKAKKPTAGRAAWAVRRERGAAVQWRGMCKLKFNRERVGCYLLVILVVALLIGVLFGLGVFRHGYERFKDLGRNHTCYDCNTG

SEQ ID NO: 233 - DNA, 11132 bp, Oryza longistaminata
  source 1..11132: mol_type = genomic DNA; note = Myb80 genomic sequence - O_longistaminata_v1.0:KN538714.1:278750:289881:-1
aactgtgtgcagaaacgaatcgtttatctttgacagttttttttttctttttgagtctatcctcctgaacctaaggctgtaaatttgttcggacaaaggatcattactcatagcctgctatgttcacaaggttttatattactgaatagtggtgtttcatctagcagcattagtgaatagttgcagtggcagtgtggtgcagggcgtcagtgagcgagatggcgaggcgagaacgcgagcggcgccgggagcgcgcggggcttggaccgtggccgtgaggggggttgacccggcgctgcgcgggtgggcaacctgtcccgccccccccggggggaggctcacgcgttgcgcgggcgttgaattctttatgccgcccatgccgccttcgcccccccgtgcgcgcgcgcgcnnnnnnnnnnnnnnnnnnnnnnnnnnnnnnnnnnnnnnnnnnnnnnnnnnnnnnnnnnnnnnnnnnnnnnnnnnnnnnnnnnnnnnnnnnnnnnnnnnnnnnnnnnnnnnnnnnnnnnnnnnnnnnnnnnnnnnnnnnnnnnnnnnnnnnnnnnnnnggagtagcagcggaatctcgacggcggcgacatcatggggcgggtgccgtgctgcgagaaggacaacgtgaagcgcgggcagtggacgcccgaggaggacaacaagctgctctcctacatcacccagtacggcacccgcaactggcgcctcatccccaagaacgccggtacgttggcgggcgcgcgcgcgccgccgccggcgaacgcgtggttgagtgagcagcggtggccgtggcgctctgaccggggtgtttgttgctggaacgttggcagggttgcagcggtgcgggaagagctgccggctgcggtggaccaactacctccggcccgacctcaagcacggcgagttcaccgacgccgaggagcagaccatcatcaagctccactccgtcgtcggcaacaggtaggcatcaacgagtggtctcgctacaccgtcttgtgatcttgggtcatttttggaggaatgtattgagcaatgcgggatggggctgtgtgtggctaggtggtcggtgatcgcggcgcagctgccggggcggacggacaacgacgtgaagaaccactggaacacgaagctgaagaagaagctgtccgggatgggcatcgaccccgtcacgcacaagtccttctcgcacctcatggccgagatcgccaccacgctggcgccgccgcaggtggcgcacctcgccgaggccgcgctggggtgcttcaaggacgagatgctccacctcctcaccaagaagcgcccctccgacttcccctcgcccgccgtgcacgacggcgccnnnnnnnnnnnnnnnnnnnnnnnnnnnnnnnnnnnnnnnnnnnnnnnnnnnnnnnnnnnnnnnnnnnnnnnnnnnnnnnnnnnnnnnnnnnnnnnnnnnnnnnnnnnnnnnnnnnnnnnnnnnnnnnnnnnnnnnnnnnnnnnnnnnnnnnnnnnnnnnnnnnnnnnnnnnnnnnnnnnnnnnnnnnnnnnnnnnnnnnnnnnnnnnnnnnnnnnnnnnnnnnnnnnnnnnnnnnnnnnnnnnnnnnnnnnnnnnnnnnnnnnnnnnnnnnnnnnnnnnnnnnnnnnnnnnnnnnnnnnnnnnnnnnnnnnnnnnnnnnnnnnnnnnnnnnnnnnnnnnnnnnnnnnnnnnnnnnnnnnnnnnnnnnnnnnnnnnnnnnnnnnnnnnnnnnnnnnnnnnnnnnnnnnnnnnnnnnnnnnnnnnnnnnnnnnnnnnnnnnnnnnnnnnnnnnnnnnnnnnnnnnnnnnnnnnnnnnnnnnnnnnnnnnnnnnnnnnnnnnnnntccggcaccgaggaggccaggcgggcgttgccggagaagggcaacgacagcgtcggcagcagcggcggcgacgacgacgccgcggacgacggcaaggacagcggtgggaagggggcagcctccgacatgtcgggcctgttcgcctccgactgcgtgctctgggacttgcccgacgagctcacgaatcacatggtgtagctaagctataaaacgcgggaaaactttgcacggcgaagcacgccatgatcaaagaactacacttgcagttgcagagaaagttgataatttaacattttcttttgtctatttgctttaatttatactccctccgtttcagattataaaacgttttaactttggtcaaagttaaactactttaggtttaacaaagtttgtagaaaaaagtagtaacattttcaactcaagacaaaattattatgaaaatatattcaattattgatctgatgaaactaatttagtattataaatattactatatttatctataaacttagttaaatttaaaacagttttgactttaacgtcttgtaacctgaaatggagggagtagtacttatgaatgatgacatgtgagatgtcaaataatcgaaggctacatgagtgttagattatcaaatctcttgcatcgcagtttgcaggtggacaaaactggatagtgcgaagaattgctaacagtgatattgctggaagagtgacagaaaaactagagttcgagagtacgtgccgagagtaagggcctcatcggatggatgaatggcctgaggcttttcagccaaagcccatcgaattgcttaatgggctgaggactttaagccagattgcttattggattgaggactttaagctcatcaagctaaataagccaaataagccaatcaatggcttttccttaccttaaggagaaaatgcaacttttgcttatcagccaaagctctatgctaaccgatgagggcctaaaatgggcattttttaaaaaattgtgaaatgtgaatagttttcttaagaagcactgattgagtgagtgattgagcaggaggccaatgtatttttccagtcctctgcttcattcacatcgattatttattagttctttgatcgatcaattgcctgatgatgagttctttttttttttttaggaaatgataatgggctgatgactttaccataaaccaaatcatttgtttaagtaatgggctgatgactaaaccctaaaccataacattgtttaagtaaatcaaatcatttgttttgaatgaagcaatgatcacactctgtcacacaacaatttatactggtatactgctgtgttgtattcagagagtcatgtgaaatttctgaatttcttcggtgaatttcgtcaatttcaccctacaaacccgtagcaaaactcccggatcttacaaccttgatcaactgtatttagatcaaaaattattatcggttcagtcttctgctaacccgagatgcctgatctggaccgtcaatacgcgatccgacggctaagaacggttgaacccaacaccctccagtcctcgactcctcccaagtcccaaacccttccttccttctcaccttgcagaatcttccgaagtatcccgtttccgttccgaagcgcccatggcggtggcggcgcagctccacnnnnnnnnnnccgcgtaccggcgacttcctctctgtcgagttccttcgtcctgccggtggccggagaatcctctcgccggttccccaaaggtacagtcccgatcggaacggtaaaccctatctatctatctatctatcagcgcagtgagtgatttggtgttcttgttccctgcgcgttcgatcattgaatgtgtggtgttcgttgttagatgaaaagagaaaaaaatagatctcgattaggtgagcagaatggttcttcggtggtgttcaattgattaagcggctgatggaattttggcgaaataaacactagaaatcatgctactgttgtttgaagagtaatttttcttgtatgaatgttttgttttttgagttcttttatttttatgtcctctgaatatgctactccgtatcagactatcaatcactacatgtattcatgcccttgtcgaaaggaactcaagaagaaagaaagaaccaattttgaatttgttttgaatgtgctgttatcagatgagtactcctgatcatgtaaataaatggattttgttggatgtatcgtgagggatgcactttggcatctagactcctatttccccccttctggaaaatgcacatgataaagttctgatgtaaatctgtatagtatttatgtattcccttgctaataagttttgcatggagcgtataactactacaatattttttttattaaaacaagagtaaatttcacaaaattgcagatgctatgaccaaactatcatagaactatagatttaactccgtgtatcacagaactacagagttaacaccaaatttatcataaatctacacatttaagatgaagtgtcacaaaactacatatttaataactaaattatcacaaaactataggtttagatctaatttaatcacaaaacaataatgtttatagctcccaacataacaatggtgctaggatttaaactctaaaagctgtagttttgtgataacttcaatattaaatatgtatttttgtggtactgccttaaatctgtagttttgcaacagttttgtcaaaatacttgtagctttgcgaaatttactctaacaattaaaggcaaaacaggtatgatactaactgtttacacattatgttgcttcagctttccatctccaccggcagagtgcgtgttggtgctaaagtttcaacaaaatgtgcaaatgggaccactcaggttgatgagttaaactttagatcaaatcaaactgaggaattagtagaagcagatgaagacactagtacccagaagaggagtgcaaaaatccatgatttttgctttgggatcccttttggtaagtttgagtttaatgaatgtagtaccctggtactaagtcaccacatggatttgtactaggagaactcacatgttttaaattgttctttttccctccttgttttgatgtagaactgtacaaatagctacttgcgggtgagatgagcttttaattgcataattgcctggaactgttgttatatattttgatttgtaccacaagtttcagaaacacctcagtttttattatgcaacaaagctcttgaagtttatattgcatagatatgaggcattgcataaatagtcttaacttttaagtcagtggaaacaatactgccattactgctttgtttcatgtccgcactcaaatgttccttattcattaactatttctaggtatggagttatttttttcagcaggttcatctttgacttttggtctgtaaattgcatggatataatagtgaaaatatcaattttgttatcttgattgtatctgcataacaaatactaacaaaaacattttttttacgaggggaataacaatgattcatatgatagtgcaggtggtcttctattctgtatggggcttctaggatacattttttcaagaagtaccataagccttgttttaggtgttgcaccagggctcgccacgctctttcttggtaccctcagtctaaaattctggaggagtggaaaatccagtttcatatttatcttgggccaagcaggtgagtccttgcctccttgggtcaaatatcactacactgagcctgctgttactaatatctgtaccgaattactgtaaccatgatcatacacatcacttatgaccagttctctttgtgattttgcagcaatttcagctgtcctagcatggaagtattcccatgcctacatcttggtaaccaccgttattactttcccgttcttatgtagcgtagcatcttagttgcgctgatctttattttgtttgtgcagacaaatagaatcctcccctgggccttctatgcatctctgaggtattgcgctctctattgttcatctgaagcctttttttttttttgggtaaaagaggatctgatatattgctactctgtttccaaaatggtgcagcactgccatggcttgtttctacgcttatgtgctgctctccggaggaaatccaccacctaagaagaagatggcggcaactccatcatcatagagcaggatccaggcatttacttagtgattaacgcaacaggatggtttggcctctgtgcctctgaatgcttcgtctgcaagtataacagaattttgagttatcatcccatttgtatattccctaatcttacattctctgtggattttggttgttgtagcgtgaagctttttgaacaaataattctgcaggatgacaatccatccttactaaacattctgctctttttcccccctccaagagcataaataaaggatatccgtttatttaacgtgctcagtggcttcttttgtcattggagttagtattaggccactcccaatggaagtttaatccccattaaatagggtgccatgtcagtaattttatgatattgcatgaaattaataaagtaagagatgaaatgagtttcatcttttaatatagtttgtttcttgcatgtactacctgtgaaacaacaaaaaatgaaaccatgcaattgtatgagctatttcaatcatcaattaaatgtcttgttgcttatacgacacttttggaaacataaaaaactaacacctttaattgggaattgcctaaaaattctagcaggtgatcggggttcagattcatactatactcaagtgagtgggttttcaatagaaatttagtaagacagatttgtcgctagtgtccatctctttcagcgtgtgttagggggaaacacgtttggagttgataagaaatttgactacattatactagtcggcaactcttattataaactagcattgtggcccgcgcacattacgcggctagcatcattataattcttattatattattaaaatnnnnnnnnnnatatattaggagagcctttatgaagccattgtagtggaatctaacttagggcatgtttggggagctttagattctgagaagcagctgtttggtagccggcttctgagaatctgaaaaagctctgaaacccagcttctccagcttctggcttcttgtttatttttcagaatctgtaactatataatctcagaagccgtagaccgtttgggacagcttctagcagctgaagcttttggaaaaagctgcagctgggcctaatcctcttatcagcgacagaaaatgaagcccaataacggcccaagttagccaacaagacagcttggcgtcttggccagatcaaactagggttttgctcctcccgctccgagaaagcgagcagctcgagctccgccgattccccacccgtggctcgtcgccgcctccgcctacgctcctcccgaccgccgccaagatgaagctcgtcaggtgaggctccggttatttcctaacctagttctgttccgcttcgtttcccggtatctctccttgctgatccgtatggtgcaaatttccccccgcgaattttttttggtgcggatttggggcgtgggggggtttcgctgcaggtttctgatgaagctgaacaacgagacggtcaccatcgagctcaagaacggcaccgtcgtccacggaaccatcatcggtaagcttttcacctcgcccacaggccacaggtcgctagtagggaatttgtgaaaaatttaggggctctccctggtgcttgtgttactaggattcattatcagcgctgtgttctgattcgacatatggccatatgggagaacagctggatgtgtttgtggtgcattttgtttgtttgtgaggcacgattttctgatgcttttgaagtgaaaacagtaggaattactacattgtattgctaaaataatgttcttcagtttcatagatagtttgataaatatgaattgcgtgggatctctccacgtttggtcaatctatctatctgtgagggtcactgctgagttctggttgggcagaactttttcacattctccctaggtctatcgcaaaacggtaatagtgggatatacagcctgaaagtgtagtggcatgtataagttggtgttgagaattcaaaatatgtaataggatattctaggtcctcgctgtcaaattgggatatttctaagctagcctcatctaacttatgttgaccctgtaatgagtatttttacctgtgtggtgtagcagtatgtcaagaatgatttcatataaaattacatttacatccataataccaaataaatgcattatcaagatattttgtggaggatttaacaaaacatttgatgttgtagatgttgatgcattttttctacaaacttagtcaaagttagagaagtttgacttatgacaaaactaaacaccttacaatatgagatggaaggattagataaatactacattgtatttgctgaaataatgttcttctggttcatacgtggtttgattaatgcgaattacatggggtttgtggacgtttgtcaatctatctttttgtgagggtcactgttgagtgctgaatatcagtttggggagggaattatttgagttctccctaggtctatcaattaaaaaaaacagcctgaaagtgtaatcacatagataagttggtgttgagaattgaaagtatgcaatgggatgttctaatggacctggctctaaaattacgatttttctaagctagcctcacctaacttttgttggtcccataataagtctcttttacctgtgtggtgtggctgtatgtcaagattgattttatagacaataggaaactgagatggttggatatttttcttgtttctagctttcttcatgttggttgaggtgtttttaggtggacaaggctgttatgtcctggaatgtttcaattctgattcatcaactttttgcaggtgtggatataagcatgaacacccacttgaagactgttaagctcacattgaaagggaaaaatcctgtaacccttgaccacctcagtgtgagaggaaacaacattcgctattacatcctccctgatagcttaaatctggaaactttactagtagaggataccccgagagtcaaggctaagaagccaactgcaggtatgaaaaagttcccctacccatctagctttgagtttgatcaatacaagaactatcaattgacctaccaatcttcgtttgtaaccagggaaacctttggggcgtgggcgcggacgcggtcgtggccgtggtcggggccgggggcgctgagctttgttattccctgttttgtgaagctcttgcagtgcaaaagtatttcaattctgttagaacagagatgccaatctcagtagttcttgctgtggaatcatcctggcatttgacctaatgttcatgtctatcaggttacatcattcataatgaacatgggcgatgccttttctcagaccttcgagattttaagtggtatgttgttagtttggttattttaatataattcttctgccttaatactgagcaagtgcttgaaatgtcttgatctattaagcatgtttggtatgaactttcaaccttgctgttttcttatctcaaaagacaaaaggaatactactagtagtttgttttcttcataaatcataattattcttcccccatttggtaggtcagcagtagctaaattcctaagttaaaaccgtgtaaatgatatgtataagattgaagttgctggtggtactcttcaactcatgctcggttcgcacgcagtctctggaccccctcgaatccctttccttttttccccctcttttgtgccttcgattctgcgggcgccgtgctgctttgcctatccaacaggagttgcgacgggcaccggtgattatacctgattggttggccgattgctttgcttccccatcgaagcaagtacgctgtcgcgatcgcattcacttctgcaacctggtcagccaattcatcccgtggtcactgctcggcaaacggcattatcatgtcctaatgatctgatcgtcccatttagaatggcaaggcgacacatgttgctctcccagaattaaactcctttcaccctcgatacactgcaaatactactacttgataaccatcatcctggtctttatgggcagagccatgtccatgtgtccgcgattagtccatacagtcgtccggctatctgcaaccgaagattccgggcatggcaaaaaggtagtaacactccaaagagtccaaacagtcaccaagctttagctatagtagcttagcttgtccctgaagcgacactgcggataccatcttagcttctccctgaagcgacactgcggataccatgccatccaggagaggcacaaggacgacacttgtgcatgcagcggcttctctccgataaaaagggcgtgcggcttgggctgtccggcgagagaggggtgcagcagtgcagtggagaggcatgtgcaagctcaagttcaacagggagagggtggggtgctacctgctggtgatcctggtggtggccctcctcatcggcgtcctcttcggcctcggcgtcttccgccacggctacgagcgcttcaaggacctcggccgcaaccacacctgctacgactgcaacaccggctgacgctttctcgatcagctagctgctcaggtttccaggttgctattgctctggtgcggagtagcgtctaaattaataaattcgtggttttttgggggtagtagtcgttgttgttttggttttgtccttggtagtcgttgttgtttggttttgtccttggtttcattcttgccaaaagcaatagaaactgctgtttctcttgtgttgtaccctagtactgcctcatttgttcagtnnnnnnnnnnaccgcctcgccgggggactctttcctgatcagctgctcaggtttccaagttgctattgctctggtgtagcgtctaaattaataaattcgtagttttttggggggtagtagtcgttgttgttttggttttgtccttggtttcgttcttgccaaaagcaatagaactggctgtttctctcgtgttgtacacttgtactgcctcatttgttcagttgtttctgttgtggttgtaccgcgtcgatcattcagtcagtactcataggtgaacagttaaattcagaccaatattaaagtaattttgagcatgatatgatatgatcagaattatgatgctcttgccgatattaccctgctacaag

SEQ ID NO: 234 - DNA, 2118 bp, synthetic construct
  source 1..2118: mol_type = other DNA; note = Dwarf11 cDNA sequence - OMERI04G13440.1
ccagagaaaaatagagggagggagagggagaagcagaggagtgttgagcacaagctagtgtaagggttagatagaaacttggtagaatagacagataggcagagagagagagagagagcttagcaagctaaggctagctgctgcaaggctccatccatgcttcttgttgtgagatgagattgagataagatgagcagggggtggtggtgcctggtgtgaggctataggtaagatggtgggaggagagcttgtgctggctgctcttgtgatcctgcttgccttgctcctgaccctggtgctgagccacttcctgcctttgctcctgaatcccaaggctcccaagggaagctttgggtggcctctccttggtgagacgctgaggttcctcagtcctcatgctagcaacaccctgggcagcttcctggaggatcactgctccaggtatgggagggtgtttaagtcccatctgttctgcacccccaccatagtgtcctgtgaccaggagctgaaccacttcatccttcagaatgaggagaggctgtttcagtgcagctaccccaggccaattcatggcattctgggcaagtcctccatgttagtggtcctaggggaggaccacaagaggctcaggaaccttgctctagcactggtcacctccacaaagctcaagcacagctaccttggcgacattgagaagattgcactgcatatagttgggtcatggcatggcaagagcaaggacaaggggatggtcaatgtcatcgccttctgcgaggaggcaagaaagtttgcattcagtgtaatagtgaagcaggtgctggggctatcaccagaggagccggtcactgccatgatacttgaagatttcctcgccttcatgaagggtctcatctctttccctctctacatcccagggacaccctatgccaaagctgccagagcgaggatatcaagcactgtgaagggtattattgaggagaggaggaatgctggctccagcaacaagggtgatttccttgatgtgctgctttcaagcaatgagctctctgatgaggagaaagtgagctttgtgctggattccttactgggaggatatgagaccacctccctcttgatctccatggtagtgtatttccttgggcagtcagctcaagatctggaactagtgaagggggagcatgaaggcataagatcgaagaaagagaaggacgagttcttgagctctgaagactataagaagatggaatatacccaacatgttatcaatgaggcactgagatgtggcaacattgtcaagtttgtccacaggaaggctctcaaagatgtcagatacaaagagtatctgattccttctggttggaaggtcctacctgttttcagtgctgttcatttgaaccccttacttcatggaaatgcccaacaatttcagccctgcagatgggagggtgcaagccaagggacaagcaagaagtttacgccgtttggcggtggcccccggctctgccctggatcagagcttgccaaagtagaggctgctttcttcctccatcaccttgtgctcaattatagatggagaatcaatggcgatgacattccgatggcatacccgtacgtggagttccagagaggtctgcccataaaaatcgagccactttgctctgaatcctgacaggtttgcagttgcagccacgctgagcgagttcatcaaatcatccccgcaagcgagggggagatgcacgcgagaacgacggagaggattagtcagtgaaacaaaaaaaagagagagaacatttcaagaactgaagaaatgcactgggcactagctagtagtacctatcaatgagccaagctgagattgtgatttgctgtacatggtgtagatatattttgtccatgctgattgcttgcggtggtggtggtgcggtgcttcaccctgtaacatcctccactgtttcaactttcatctgctattctatagaagaaaaaaaaggaagaaaattgggctatttggctattgaaaagattttggatgaagccaaagatcttgaaaaacaaatcattgaaactttgaaagagtactcctatcctttaataatatgaacatgaacatgtatggac

SEQ ID NO: 235 - DNA, 1437 bp, synthetic construct
  source 1..1437: mol_type = other DNA; note = Dwarf11 coding sequence - OMERI04G13440.1
atggtgggaggagagcttgtgctggctgctcttgtgatcctgcttgccttgctcctgaccctggtgctgagccacttcctgcctttgctcctgaatcccaaggctcccaagggaagctttgggtggcctctccttggtgagacgctgaggttcctcagtcctcatgctagcaacaccctgggcagcttcctggaggatcactgctccaggtatgggagggtgtttaagtcccatctgttctgcacccccaccatagtgtcctgtgaccaggagctgaaccacttcatccttcagaatgaggagaggctgtttcagtgcagctaccccaggccaattcatggcattctgggcaagtcctccatgttagtggtcctaggggaggaccacaagaggctcaggaaccttgctctagcactggtcacctccacaaagctcaagcacagctaccttggcgacattgagaagattgcactgcatatagttgggtcatggcatggcaagagcaaggacaaggggatggtcaatgtcatcgccttctgcgaggaggcaagaaagtttgcattcagtgtaatagtgaagcaggtgctggggctatcaccagaggagccggtcactgccatgatacttgaagatttcctcgccttcatgaagggtctcatctctttccctctctacatcccagggacaccctatgccaaagctgccagagcgaggatatcaagcactgtgaagggtattattgaggagaggaggaatgctggctccagcaacaagggtgatttccttgatgtgctgctttcaagcaatgagctctctgatgaggagaaagtgagctttgtgctggattccttactgggaggatatgagaccacctccctcttgatctccatggtagtgtatttccttgggcagtcagctcaagatctggaactagtgaagggggagcatgaaggcataagatcgaagaaagagaaggacgagttcttgagctctgaagactataagaagatggaatatacccaacatgttatcaatgaggcactgagatgtggcaacattgtcaagtttgtccacaggaaggctctcaaagatgtcagatacaaagagtatctgattccttctggttggaaggtcctacctgttttcagtgctgttcatttgaaccccttacttcatggaaatgcccaacaatttcagccctgcagatgggagggtgcaagccaagggacaagcaagaagtttacgccgtttggcggtggcccccggctctgccctggatcagagcttgccaaagtagaggctgctttcttcctccatcaccttgtgctcaattatagatggagaatcaatggcgatgacattccgatggcatacccgtacgtggagttccagagaggtctgcccataaaaatcgagccactttgctctgaatcctga

SEQ ID NO: 236 - protein, 478 aa, synthetic construct
  source 1..478: note = Dwarf11 protein sequence - OMERI04G13440.1
MVGGELVLAALVILLALLLTLVLSHFLPLLLNPKAPKGSFGWPLLGETLRFLSPHASNTLGSFLEDHCSRYGRVFKSHLFCTPTIVSCDQELNHFILQNEERLFQCSYPRPIHGILGKSSMLVVLGEDHKRLRNLALALVTSTKLKHSYLGDIEKIALHIVGSWHGKSKDKGMVNVIAFCEEARKFAFSVIVKQVLGLSPEEPVTAMILEDFLAFMKGLISFPLYIPGTPYAKAARARISSTVKGIIEERRNAGSSNKGDFLDVLLSSNELSDEEKVSFVLDSLLGGYETTSLLISMVVYFLGQSAQDLELVKGEHEGIRSKKEKDEFLSSEDYKKMEYTQHVINEALRCGNIVKFVHRKALKDVRYKEYLIPSGWKVLPVFSAVHLNPLLHGNAQQFQPCRWEGASQGTSKKFTPFGGGPRLCPGSELAKVEAAFFLHHLVLNYRWRINGDDIPMAYPYVEFQRGLPIKIEPLCSES

SEQ ID NO: 237 - DNA, 5729 bp, Oryza meridionalis
  source 1..5729: mol_type = genomic DNA; note = Dwarf11 genomic sequence - ryza_meridionalis_v1.3:4:18984801:18990529:-1
tttgtcatgaaaaagaagggctttaggaaatgacacagatatgagtcatcgaagcaggggatccccaagaacagattgcaaaggtaaggtgtgtgtgctcgcgcgcataagctttcatcagattcagagagagcttaattatcaccgatgtcccatgcatcgatctgcacctggctgtgcatgtactaccccaatgcatttctctctctacctgcgtgtttgactgcaccttgagcagcagcagcagcctagatgctagctactctgcattggaccatcctcctagtcctaggctgtaggctcatagccctccttgataaaagctactattggcacagtatatgcatgcagccaattcacttcactgcagtaaaaaaaaaaaaaagaaaacagagagaaacagagatcaaacaatgcaagaaagaaatacccctacttctactttaaaacaaggccaaagcaaggaaacaaaaggcagcctctattttttttccctcccccccccctgctcatcacccctttccatcactccctccctttgcaaagatccttcctgcctttgcttctactgctatatagcctcccccctcaccttccattccagagaaaaatagagggagggagagggagaagcagaggagtgttgagcacaagctagtgtaagggttagatagaaacttggtagaatagacagataggcagagagagagagagagagcttagcaagctaaggctagctgctgcaaggctccatccatgcttcttgttgtgagatgagattgagataagatgagcagggggtggtggtgcctggtgtgaggctataggtaagatggtgggaggagagcttgtgctggctgctcttgtgatcctgcttgccttgctcctgaccctggtgctgagccacttcctgcctttgctcctgaatcccaaggctcccaagggaagctttgggtggcctctccttggtgagacgctgaggttcctcagtcctcatgctagcaacaccctgggcagcttcctggaggatcactgctccaggtaaattaaaatcatatgcagtaaacatttctatcagtatcaccaccaccaccaccacacaggagcaacaagtgtcatcttaccatgcaattaagtactgtaccattatttcatgtgacagcaaaaggtaatgctgctgtcctgtcccagcagctttatcacgccctttttcttcctccctgatgagggggtgctgtaacatgaattggacagtgtttagcatcttgttaaagagttgtgcaaaccttttcttccgatgaacaagtgagagaaaaggaatgtaaaggttgcacaacacttaactagctagcatgcatggtggtagtaacactgatgatggtgtgatgatgatgatgcaggtatgggagggtgtttaagtcccatctgttctgcacccccaccatagtgtcctgtgaccaggagctgaaccacttcatccttcagaatgaggagaggctgtttcagtgcagctaccccaggccaattcatggcattctgggcaagtcctccatgttagtggtcctaggggaggaccacaagaggctcaggaaccttgctctagcactggtcacctccacaaagctcaagcacagctaccttggcgacattgagaagattgcactgcatatagttgggtcatggcatggcaagagcaaggacaaggggatggtcaatgtcatcgccttctgcgaggaggcaagaaaggttagcaagtgtactaacttgaaaccagagccatatcaccacaaggacatgatcccttgaaacaagggagggaaaactttgcacatgttagctacataccatcatcatcatgttgttacttgctgccgcatgaatctttgtcccaaggtcactttgacttaccatggtcttttttaccttttctttttttctctctctctctggtgtgatctctttccttgagaaccacagtttgcattcagtgtaatagtgaagcaggtgctggggctatcaccagaggagccggtcactgccatgatacttgaagatttcctcgccttcatgaagggtctcatctctttccctctctacatcccagggacaccctatgccaaagctgtgcaggcatgcaactcaacatctcatttacacaagtcgttaaactgtcaataaaattttcaggccattttatttttgtatacttaccataataacttcatccttttgttcgcgaatcctcacaggccagagcgaggatatcaagcactgtgaagggtattattgaggagaggaggaatgctggctccagcaacaagggtgatttccttgatgtgctgctttcaagcaatgagctctctgatgaggagaaagtgagctttgtgctggattccttactgggaggatatgagaccacctccctcttgatctccatggtagtgtatttccttgggcagtcagctcaagatctggaactagtgaaggtatacagacttctcatgctgaaaaagacagagcagtactggtaaataagtacttaattaagtggccatcaataaaatatatattaacatgtttgcatgcagggggagcatgaaggcataagatcgaagaaagagaaggacgagttcttgagctctgaagactataagaagatggaatatacccaacatgtaagatgatcgttcaatacatgctttaggattggttagtaagccagggtacctttttttcctattatcagcaactacacaaatatgtgaccctccaaatatgaggtttactcatattcagaccgattctcctatgcctacccatatatgcaatttttgaattaagcaaaaaaagaaaaagaaacagagagagaaagaatctcattacaatagagtgaaaagggcagaagggacatgttcttcaataatggaaactgtatgatgatgcatatgctatgcccttacaggttatcaatgaggcactgagatgtggcaacattgtcaagtttgtccacaggaaggctctcaaagatgtcagatacaaaggtaattaaccctacttgaggctttccttgaagattccattgtgctcatcacatgataatggatcaggcaaagtggatggttgcacctttattactgatttttaagcattgttattcctaaaatacctcagcttttcatagaagatgctcaaaagcaagtggctcttttttctttgctctgttgcagagtatctgattccttctggttggaaggtcctacctgttttcagtgctgttcatttgaaccccttacttcatggaaatgcccaacaatttcagccctgcagatgggaggtacgtttgtttccataatctgtgaatgctccgcaatacttactaaatgtttattgttaatgacctaatgaaaaatgttttggaccagctaggccacgaagcttagctttcacgtagtatacttttctataatacaaatttataaaatgaaaagttcagagcacctatcaagagagcttatctggagccttgaaagaatcttctttaaagggtgttctctaactaattgctacctttaattagtgagcgtccaactatgacataattactcgcaactattctggtgtcttcagatgccaaacaagctccctgtggctgcaatgccttttgtgcatggtcctaaccatgattcctctcattcaaagccagcattcttggctttgcttccttttcttagtttctgtgatgaagctaatggtctgattcatgtgtgttcctaatctgattgatgcaacagggtgcaagccaagggacaagcaagaagtttacgccgtttggcggtggcccccggctctgccctggatcagagcttgccaaagtagaggctgctttcttcctccatcaccttgtgctcaattataggtaaaacaaaagggtatatttgtcctacccgagtagaagatgcatggatcaaagttgactggcttaaacagcaatgaacaaaatacgttcagaagtaatatttaagaagctggtgcagagtagttggtgtttaaataggccatagaaaactgttgaggcaaacatgaacaggaaaacatactgatgcagttaccactctcatactgataatacacactacactagaccactagtaagtaatggcaagaaggccatggcagcaactaggcaaattatttatgcttttgtctgtaaggaccgcaagtctgaactcagctatcttgtgcattttcataagtggcactgtagagcatagaatcagacgacaacacacagaacaaacatgacagcatggagtttttgataggtaggctatgcaagttgagttgagggctgccatacaagataaaatatactaccacgatatgatcaaactctttttttttaaaaaaaaaaactaggttcattagcaacaatctatacgtgacaactgacaagaacaggcagatttatgtaaattatgcggttgtttcagactacagtctacatgtacttactgaatatccatgccagagaaaggctgatcatcgttcttcgtttctttgtttcttgaaaacctgtgcagatggagaatcaatggcgatgacattccgatggcatacccgtacgtggagttccagagaggtctgcccataaaaatcgagccactttgctctgaatcctgacaggtttgcagttgcagccacgctgagcgagttcatcaaatcatccccgcaagcgagggggagatgcacgcgagaacgacggagaggattagtcagtgaaacaaaaaaaagagagagaacatttcaagaactgaagaaatgcactgggcactagctagtagtacctatcaatgagccaagctgagattgtgatttgctgtacatggtgtagatatattttgtccatgctgattgcttgcggtggtggtggtgcggtgcttcaccctgtaacatcctccactgtttcaactttcatctgctattctatagaagaaaaaaaaggaagaaaattgggctatttggctattgaaaagattttggatgaagccaaagatcttgaaaaacaaatcattgaaactttgaaagagtactcctatcctttaataatatgaacatgaacatgtatggactgtactctgcactacttctcagggaatttcggagcagacaaattcgatcgtggataatccctatcaatcggagatggctggtcccgtttggattggaggaatttctcaaggaatccttccctgcaggggaaatcttagtttcagtgtttctggactgaaggaaaaaaccggacgaacagcagcattattccataagagtggagtttccccctcacatcgctagacgatttcacgggataacattccccgaatccaccacgcgcaacctagctgatcaggatcgaggccggattccagccgcgccgcgccgcgccgtcgtccccgtatccaatccaccgcggcgtcgactctcccgccgttgcgcccagcccaacgccgccggcggtcccgcctctagcggcgcccgcaggatcatctgcacacccccgcgcgccaccgccgcccgccatgcccgcccgctcgagctcaacgtgagaaggggaaggggagagagatcatagtatgagaggttactttactggagaggataagataacgatgttaaagagaaaaaggtataaaaaagaaagagaaagaaagagagaaagagaaatatcataa

SEQ ID NO: 238 - DNA, 2727 bp, synthetic construct
  source 1..2727: mol_type = other DNA; note = Myb80 cDNA sequence - OMERI04G13500.1
nngggggaaccaccatcataaatcgatcgcctccagtagaggcagttgagcgacagcgagcctgtctcttaaaaaaataaaattagtcccctccacgcgccgcgtgttcctcgtcctctggttgccaggacagagcacgggggccggcggcgatggcgctcggcgacggggacgacggcgcggccgccgccgttcctctcatctcggatcgccccaagcatgccgccatcgtcagaagcgggacggagtggacggcggcggcgcacgtgatcacggcggtgatcgggtccggggtgctgtcgctggcgtggagcgtggcgcagctggggtggctggcggggccggggatgatgctcgtgttcgcggccgtgacggcgctgcagtcggcgctgttcgccgactgctaccggtcgccggacccggaggtcggcccgcaccgcaaccgcacctacgccaacgccgtcgagcgcaacctaggtagctcgagcgcgtgggtctgcttgttgctgcagcaaacggccttgttcggctacggcatcgcctacaccatcaccgcctccatcagctgcagggcgatcctgaggtccaactgctaccacacgcacggccacgacgcgccctgcaaatacgggggcagctactacatgctcgtgttcggcgccgcgcagctgttcctctccttcattccggacttccatgacatggcgtggctgtcggtccttgccgcggtcatgtcgttctcctactcgttcatcggcctcggcctcggcctcgccaacacaattgctaatggaacgatcaaaggaagcataacaggtgctccaacgagaacccctgtgcagaaggtctggcacgtctcgcaggccatcggtgacatcgcattcgcgtacccgtactcattaatcctcttggaaattcaggacaccctgaaggctccaccggccgagaacaagacgatgaagaaggcgtccatcatctcgatcgtcgtcaccaccttcttctacctctgctgcggctgcttcggctacgccgccttcgggagcgacgccccaggcaacctcctcaccggcttcggcttctacgagccctactggctcatcgacttcgccaacgcctgcatcatcctccacctgctcggcggctaccaggtgtacagccagccgatataccagttcgcggacaggttcttcgcggagaggtacccggcgagccggttcgtgaacgacttccacacggtgaagctgccgctgctgccgccgtgtcgggtgaacctcctgcgggtgtgcttccggacggtgtacgtggcgagcacgacggcggtggcgctcgccttcccctacttcaacgaggtgctcgcgcttctcggcgccctcaacttctggccgctcgccatctacttccccgtggagatgtacttcatccagcgccaggtcccccggtggtcgccccggtgggtcgtgctgcagtcgttcagcgtcctctgcctcctcgtcagcgccttcgcgctcgtcggctccatccagggcctcatcagccagaagctaggctaaagatttagtctagcatcctgaattcggatttgctttttctttgtgtaaccgtaatgggatgagaatgcattggtggtcgtgtgttgtttgtaacaactggggagcggagctttgtccctggtgaatggcgcgatgaactcatgaacaatagcatagtggtggtggtacattgtgtctgcaggggtcagagggtagtggcactatgtttttcagtgcctttcctcctgtgctgcagagaaactgctcctatatatgtacagaatgtcgtcatattattgccatgatacttggaacggtgaaaggaacctgctcttgaatgatgtataaatcagagagagaaaaaaagactgcgtttatctttgacagttttttttgttaggtctatcctcctgaacccaaggctgtaaatttgtttagacaaaggatcattactcatacccctgcttatgttcacaaggttttatattactgaatagtggtgtttcatctagcaacattagtgaatagctgcagtgccagactgcccagtgtgcaggggcgtcagtgagcgagatggcgaggcgagaacgcgagcggcgccgggaggccgcggcttggaccgtggccgtgggggggttgacccggcgctgcgcgggtgggcaacctgtcccgcccccccggggggaggctcacgcgttgcgcgggcgttgaattctttatgccgcccatgccgccttcgccccccccctgcgggcgcgcgcgcccaatcgccggcgcggcagcgcgcgcgcgcgcgcgcgcgggcggtcgcgaggccgcgagcctatttatacacgcggcgcggccgtgtgagcgccgcacgcacgcacgcacgcagcagcggaatctcgacggcgggggtgggcggcgacgacatcatggggcgggtgccgtgctgcgagaaggacaacgtgaagcgcgggcagtggacgcccgaggaggacaacaagctgctctcctacatcacccagtacggcacccgcaactggcgcctcatccccaagaacgccggtacgttggggcgaacgcgtggttgagcagcggtggctgtggcgctctgaccggggtgtttgctgctggaacgttggcagggttgcagcggtgcgggaagagctgccggctgcggtggaccaactacctccggcccgacctcaagcac

SEQ ID NO: 239 - DNA, 1398 bp, synthetic construct
  source 1..1398: mol_type = other DNA; note = Myb80 coding sequence - OMERI04G13500.1
atggcgctcggcgacggggacgacggcgcggccgccgccgttcctctcatctcggatcgccccaagcatgccgccatcgtcagaagcgggacggagtggacggcggcggcgcacgtgatcacggcggtgatcgggtccggggtgctgtcgctggcgtggagcgtggcgcagctggggtggctggcggggccggggatgatgctcgtgttcgcggccgtgacggcgctgcagtcggcgctgttcgccgactgctaccggtcgccggacccggaggtcggcccgcaccgcaaccgcacctacgccaacgccgtcgagcgcaacctaggtagctcgagcgcgtgggtctgcttgttgctgcagcaaacggccttgttcggctacggcatcgcctacaccatcaccgcctccatcagctgcagggcgatcctgaggtccaactgctaccacacgcacggccacgacgcgccctgcaaatacgggggcagctactacatgctcgtgttcggcgccgcgcagctgttcctctccttcattccggacttccatgacatggcgtggctgtcggtccttgccgcggtcatgtcgttctcctactcgttcatcggcctcggcctcggcctcgccaacacaattgctaatggaacgatcaaaggaagcataacaggtgctccaacgagaacccctgtgcagaaggtctggcacgtctcgcaggccatcggtgacatcgcattcgcgtacccgtactcattaatcctcttggaaattcaggacaccctgaaggctccaccggccgagaacaagacgatgaagaaggcgtccatcatctcgatcgtcgtcaccaccttcttctacctctgctgcggctgcttcggctacgccgccttcgggagcgacgccccaggcaacctcctcaccggcttcggcttctacgagccctactggctcatcgacttcgccaacgcctgcatcatcctccacctgctcggcggctaccaggtgtacagccagccgatataccagttcgcggacaggttcttcgcggagaggtacccggcgagccggttcgtgaacgacttccacacggtgaagctgccgctgctgccgccgtgtcgggtgaacctcctgcgggtgtgcttccggacggtgtacgtggcgagcacgacggcggtggcgctcgccttcccctacttcaacgaggtgctcgcgcttctcggcgccctcaacttctggccgctcgccatctacttccccgtggagatgtacttcatccagcgccaggtcccccggtggtcgccccggtgggtcgtgctgcagtcgttcagcgtcctctgcctcctcgtcagcgccttcgcgctcgtcggctccatccagggcctcatcagccagaagctaggctaa

SEQ ID NO: 240 - protein, 465 aa, synthetic construct
  source 1..465: note = Myb80 protein sequence - OMERI04G13500.1
MALGDGDDGAAAAVPLISDRPKHAAIVRSGTEWTAAAHVITAVIGSGVLSLAWSVAQLGWLAGPGMMLVFAAVTALQSALFADCYRSPDPEVGPHRNRTYANAVERNLGSSSAWVCLLLQQTALFGYGIAYTITASISCRAILRSNCYHTHGHDAPCKYGGSYYMLVFGAAQLFLSFIPDFHDMAWLSVLAAVMSFSYSFIGLGLGLANTIANGTIKGSITGAPTRTPVQKVWHVSQAIGDIAFAYPYSLILLEIQDTLKAPPAENKTMKKASIISIVVTTFFYLCCGCFGYAAFGSDAPGNLLTGFGFYEPYWLIDFANACIILHLLGGYQVYSQPIYQFADRFFAERYPASRFVNDFHTVKLPLLPPCRVNLLRVCFRTVYVASTTAVALAFPYFNEVLALLGALNFWPLAIYFPVEMYFIQRQVPRWSPRWVVLQSFSVLCLLVSAFALVGSIQGLISQKLG

SEQ ID NO: 241 - DNA, 2702 bp, synthetic construct
  source 1..2702: mol_type = other DNA; note = Myb80 cDNA sequence - OMERI04G13500.2
gcagcggatcgctcgatcgattgccttatacctccacgtctcgccgtccgtctccaaccccaaccccacccactgatcctgcagctagcctcttctcccgtcgcgcggcgaaccaggcgcaatggcggtgcaccactccctcgaggtggccgccgcaggaggcgacggcagcggcggccgatgctacgacgacgacggccacccggcacgcaccgggacggtgtggacgtgcgtggcgcacatcatcacggcggtgatcgggtccggggtgctgtcgctggcgtggagcgtggcgcagctcgggtgggtgggcgggccggcctgcatggtgtgcttcgcgctcgtcacctacgtctccgccgcgctgctctccgactgctaccgccgcggcggcgacgacgacaagggcccccggagccgatcctacatggacgccgtccgcgccttcctcggcaagaagcacacctgggcctgcggcttgctccagtacgcgagcctgtacggctgcggcgtcgcgtataccatcaccaccgccactagcatgagggcgatcctgaggtccaactgctaccacacgcacggccacgacgcgccctgcaaatacgggggcagctactacatgctcgtgttcggcgccgcgcagctgttcctctccttcattccggacttccatgacatggcgtggctgtcggtccttgccgcggtcatgtcgttctcctactcgttcatcggcctcggcctcggcctcgccaacacaattgctaatggaacgatcaaaggaagcataacaggtgctccaacgagaacccctgtgcagaaggtctggcacgtctcgcaggccatcggtgacatcgcattcgcgtacccgtactcattaatcctcttggaaattcaggacaccctgaaggctccaccggccgagaacaagacgatgaagaaggcgtccatcatctcgatcgtcgtcaccaccttcttctacctctgctgcggctgcttcggctacgccgccttcgggagcgacgccccaggcaacctcctcaccggcttcggcttctacgagccctactggctcatcgacttcgccaacgcctgcatcatcctccacctgctcggcggctaccaggtgtacagccagccgatataccagttcgcggacaggttcttcgcggagaggtacccggcgagccggttcgtgaacgacttccacacggtgaagctgccgctgctgccgccgtgtcgggtgaacctcctgcgggtgtgcttccggacggtgtacgtggcgagcacgacggcggtggcgctcgccttcccctacttcaacgaggtgctcgcgcttctcggcgccctcaacttctggccgctcgccatctacttccccgtggagatgtacttcatccagcgccaggtcccccggtggtcgccccggtgggtcgtgctgcagtcgttcagcgtcctctgcctcctcgtcagcgccttcgcgctcgtcggctccatccagggcctcatcagccagaagctaggctaaagatttagtctagcatcctgaattcggatttgctttttctttgtgtaaccgtaatgggatgagaatgcattggtggtcgtgtgttgtttgtaacaactggggagcggagctttgtccctggtgaatggcgcgatgaactcatgaacaatagcatagtggtggtggtacattgtgtctgcaggggtcagagggtagtggcactatgtttttcagtgcctttcctcctgtgctgcagagaaactgctcctatatatgtacagaatgtcgtcatattattgccatgatacttggaacggtgaaaggaacctgctcttgaatgatgtataaatcagagagagaaaaaaagactgcgtttatctttgacagttttttttgttaggtctatcctcctgaacccaaggctgtaaatttgtttagacaaaggatcattactcatacccctgcttatgttcacaaggttttatattactgaatagtggtgtttcatctagcaacattagtgaatagctgcagtgccagactgcccagtgtgcaggggcgtcagtgagcgagatggcgaggcgagaacgcgagcggcgccgggaggccgcggcttggaccgtggccgtgggggggttgacccggcgctgcgcgggtgggcaacctgtcccgcccccccggggggaggctcacgcgttgcgcgggcgttgaattctttatgccgcccatgccgccttcgccccccccctgcgggcgcgcgcgcccaatcgccggcgcggcagcgcgcgcgcgcgcgcgcgcgggcggtcgcgaggccgcgagcctatttatacacgcggcgcggccgtgtgagcgccgcacgcacgcacgcacgcagcagcggaatctcgacggcgggggtgggcggcgacgacatcatggggcgggtgccgtgctgcgagaaggacaacgtgaagcgcgggcagtggacgcccgaggaggacaacaagctgctctcctacatcacccagtacggcacccgcaactggcgcctcatccccaagaacgccggtacgttggggcgaacgcgtggttgagcagcggtggctgtggcgctctgaccggggtgtttgctgctggaacgttggcagggttgcagcggtgcgggaagagctgccggctgcggtggaccaactacctccggcccgacctcaagcac

SEQ ID NO: 242 - DNA, 1404 bp, synthetic construct
  source 1..1404: mol_type = other DNA; note = Myb80 coding sequence - OMERI04G13500.2
atggcggtgcaccactccctcgaggtggccgccgcaggaggcgacggcagcggcggccgatgctacgacgacgacggccacccggcacgcaccgggacggtgtggacgtgcgtggcgcacatcatcacggcggtgatcgggtccggggtgctgtcgctggcgtggagcgtggcgcagctcgggtgggtgggcgggccggcctgcatggtgtgcttcgcgctcgtcacctacgtctccgccgcgctgctctccgactgctaccgccgcggcggcgacgacgacaagggcccccggagccgatcctacatggacgccgtccgcgccttcctcggcaagaagcacacctgggcctgcggcttgctccagtacgcgagcctgtacggctgcggcgtcgcgtataccatcaccaccgccactagcatgagggcgatcctgaggtccaactgctaccacacgcacggccacgacgcgccctgcaaatacgggggcagctactacatgctcgtgttcggcgccgcgcagctgttcctctccttcattccggacttccatgacatggcgtggctgtcggtccttgccgcggtcatgtcgttctcctactcgttcatcggcctcggcctcggcctcgccaacacaattgctaatggaacgatcaaaggaagcataacaggtgctccaacgagaacccctgtgcagaaggtctggcacgtctcgcaggccatcggtgacatcgcattcgcgtacccgtactcattaatcctcttggaaattcaggacaccctgaaggctccaccggccgagaacaagacgatgaagaaggcgtccatcatctcgatcgtcgtcaccaccttcttctacctctgctgcggctgcttcggctacgccgccttcgggagcgacgccccaggcaacctcctcaccggcttcggcttctacgagccctactggctcatcgacttcgccaacgcctgcatcatcctccacctgctcggcggctaccaggtgtacagccagccgatataccagttcgcggacaggttcttcgcggagaggtacccggcgagccggttcgtgaacgacttccacacggtgaagctgccgctgctgccgccgtgtcgggtgaacctcctgcgggtgtgcttccggacggtgtacgtggcgagcacgacggcggtggcgctcgccttcccctacttcaacgaggtgctcgcgcttctcggcgccctcaacttctggccgctcgccatctacttccccgtggagatgtacttcatccagcgccaggtcccccggtggtcgccccggtgggtcgtgctgcagtcgttcagcgtcctctgcctcctcgtcagcgccttcgcgctcgtcggctccatccagggcctcatcagccagaagctaggctaa

SEQ ID NO: 243 - protein, 467 aa, synthetic construct
  source 1..467: note = Myb80 protein sequence - OMERI04G13500.2
MAVHHSLEVAAAGGDGSGGRCYDDDGHPARTGTVWTCVAHIITAVIGSGVLSLAWSVAQLGWVGGPACMVCFALVTYVSAALLSDCYRRGGDDDKGPRSRSYMDAVRAFLGKKHTWACGLLQYASLYGCGVAYTITTATSMRAILRSNCYHTHGHDAPCKYGGSYYMLVFGAAQLFLSFIPDFHDMAWLSVLAAVMSFSYSFIGLGLGLANTIANGTIKGSITGAPTRTPVQKVWHVSQAIGDIAFAYPYSLILLEIQDTLKAPPAENKTMKKASIISIVVTTFFYLCCGCFGYAAFGSDAPGNLLTGFGFYEPYWLIDFANACIILHLLGGYQVYSQPIYQFADRFFAERYPASRFVNDFHTVKLPLLPPCRVNLLRVCFRTVYVASTTAVALAFPYFNEVLALLGALNFWPLAIYFPVEMYFIQRQVPRWSPRWVVLQSFSVLCLLVSAFALVGSIQGLISQKLG

SEQ ID NO: 244 - DNA, 2273 bp, synthetic construct
  source 1..2273: mol_type = other DNA; note = Myb80 cDNA sequence - OMERI04G13500.3
gggggaaccaccatcataaatcgatcgcctccagtagaggcagttgagcgacagcgagcctgtctcttaaaaaaataaaattagtcccctccacgcgccgcgtgttcctcgtcctctggttgccaggacagagcacgggggccggcggcgatggcgctcggcgacggggacgacggcgcggccgccgccgttcctctcatctcggatcgccccaagcatgccgccatcgtcagaagcgggacggagtggacggcggcggcgcacgtgatcacggcggtgatcgggtccggggtgctgtcgctggcgtggagcgtggcgcagctggggtggctggcggggccggggatgatgctcgtgttcgcggccgtgacggcgctgcagtcggcgctgttcgccgactgctaccggtcgccggacccggaggtcggcccgcaccgcaaccgcacctacgccaacgccgtcgagcgcaacctaggtagctcgagcgcgtgggtctgcttgttgctgcagcaaacggccttgttcggctacggcatcgcctacaccatcaccgcctccatcagctgcagggcgatcctgaggtccaactgctaccacacgcacggccacgacgcgccctgcaaatacgggggcagctactacatgctcgtgttcggcgccgcgcagctgttcctctccttcattccggacttccatgacatggcgtggctgtcggtccttgccgcggtcatgtcgttctcctactcgttcatcggcctcggcctcggcctcgccaacacaattgctaatggaacgatcaaaggaagcataacaggtgctccaacgagaacccctgtgcagaaggtctggcacgtctcgcaggccatcggtgacatcgcattcgcgtacccgtactcattaatcctcttggaaattcaggacaccctgaaggctccaccggccgagaacaagacgatgaagaaggcgtccatcatctcgatcgtcgtcaccaccttcttctacctctgctgcggctgcttcggctacgccgccttcgggagcgacgccccaggcaacctcctcaccggcttcggcttctacgagccctactggctcatcgacttcgccaacgcctgcatcatcctccacctgctcggcggctaccaggtgtacagccagccgatataccagttcgcggacaggttcttcgcggagaggtacccggcgagccggttcgtgaacgacttccacacggtgaagctgccgctgctgccgccgtgtcgggtgaacctcctgcgggtgtgcttccggacggtgtacgtggcgagcacgacggcggtggcgctcgccttcccctacttcaacgaggtgctcgcgcttctcggcgccctcaacttctggccgctcgccatctacttccccgtggagatgtacttcatccagcgccaggtcccccggtggtcgccccggtgggtcgtgctgcagtcgttcagcgtcctctgcctcctcgtcagcgccttcgcgctcgtcggctccatccagggcctcatcagccagaagctaggctaaagatttagtctagcatcctgaattcggatttgctttttctttgtgtaaccgtaatgggatgagaatgcattggtggtcgtgtgttgtttgtaacaactggggagcggagctttgtccctggtgaatggcgcgatgaactcatgaacaatagcatagtggtggtggtacattgtgtctgcaggggtcagagggtagtggcactatgtttttcagtgcctttcctcctgtgctgcagagaaactgctcctatatatgtacagaatgtcgtcatattattgccatgatacttggaacggtgaaaggaacctgctcttgaatgatgtataaatcagagagagaaaaaaagactgctcagtactgtgcttatctatcagattcgtagagctcggtatgcatcgattaattggtttcaggttgcgttggcattgagcatgcgtaagccatgtatctgctttgggtgattttactgaaatggtgggaaaagaacatgattcagggtgttcttggaactggcagccgctggcctttgtgttcttgatgataaggattggggaataaaatagcatcctcatatcaagagtgtaatcaactaatcatagtgctgcagcccacagaaatatgcattccccttgcttgtaaagatcctactaggataaactgtgtgcacaaatgaatcgtttatctttgacagttttttttgttaggtctatcctcctgaacccaag

SEQ ID NO: 245 - DNA, 1398 bp, synthetic construct; identical to SEQ ID NO: 239
  source 1..1398: mol_type = other DNA; note = Myb80 coding sequence - OMERI04G13500.3

SEQ ID NO: 246 - protein, 465 aa, synthetic construct; identical to SEQ ID NO: 240
  source 1..465: note = Myb80 protein sequence - OMERI04G13500.3

SEQ ID NO: 247 - DNA, 2250 bp, synthetic construct
  source 1..2250: mol_type = other DNA; note = Myb80 cDNA sequence - OMERI04G13500.4
gcagcggatcgctcgatcgattgccttatacctccacgtctcgccgtccgtctccaaccccaaccccacccactgatcctgcagctagcctcttctcccgtcgcgcggcgaaccaggcgcaatggcggtgcaccactccctcgaggtggccgccgcaggaggcgacggcagcggcggccgatgctacgacgacgacggccacccggcacgcaccgggacggtgtggacgtgcgtggcgcacatcatcacggcggtgatcgggtccggggtgctgtcgctggcgtggagcgtggcgcagctcgggtgggtgggcgggccggcctgcatggtgtgcttcgcgctcgtcacctacgtctccgccgcgctgctctccgactgctaccgccgcggcggcgacgacgacaagggcccccggagccgatcctacatggacgccgtccgcgccttcctcggcaagaagcacacctgggcctgcggcttgctccagtacgcgagcctgtacggctgcggcgtcgcgtataccatcaccaccgccactagcatgagggcgatcctgaggtccaactgctaccacacgcacggccacgacgcgccctgcaaatacgggggcagctactacatgctcgtgttcggcgccgcgcagctgttcctctccttcattccggacttccatgacatggcgtggctgtcggtccttgccgcggtcatgtcgttctcctactcgttcatcggcctcggcctcggcctcgccaacacaattgctaatggaacgatcaaaggaagcataacaggtgctccaacgagaacccctgtgcagaaggtctggcacgtctcgcaggccatcggtgacatcgcattcgcgtacccgtactcattaatcctcttggaaattcaggacaccctgaaggctccaccggccgagaacaagacgatgaagaaggcgtccatcatctcgatcgtcgtcaccaccttcttctacctctgctgcggctgcttcggctacgccgccttcgggagcgacgccccaggcaacctcctcaccggcttcggcttctacgagccctactggctcatcgacttcgccaacgcctgcatcatcctccacctgctcggcggctaccaggtgtacagccagccgatataccagttcgcggacaggttcttcgcggagaggtacccggcgagccggttcgtgaacgacttccacacggtgaagctgccgctgctgccgccgtgtcgggtgaacctcctgcgggtgtgcttccggacggtgtacgtggcgagcacgacggcggtggcgctcgccttcccctacttcaacgaggtgctcgcgcttctcggcgccctcaacttctggccgctcgccatctacttccccgtggagatgtacttcatccagcgccaggtcccccggtggtcgccccggtgggtcgtgctgcagtcgttcagcgtcctctgcctcctcgtcagcgccttcgcgctcgtcggctccatccagggcctcatcagccagaagctaggctaaagatttagtctagcatcctgaattcggatttgctttttctttgtgtaaccgtaatgggatgagaatgcattggtggtcgtgtgttgtttgtaacaactggggagcggagctttgtccctggtgaatggcgcgatgaactcatgaacaatagcatagtggtggtggtacattgtgtctgcaggggtcagagggtagtggcactatgtttttcagtgcctttcctcctgtgctgcagagaaactgctcctatatatgtacagaatgtcgtcatattattgccatgatacttggaacggtgaaaggaacctgctcttgaatgatgtataaatcagagagagaaaaaaagactgctcagtactgtgcttatctatcagattcgtagagctcggtatgcatcgattaattggtttcaggttgcgttggcattgagcatgcgtaagccatgtatctgctttgggtgattttactgaaatggtgggaaaagaacatgattcagggtgttcttggaactggcagccgctggcctttgtgttcttgatgataaggattggggaataaaatagcatcctcatatcaagagtgtaatcaactaatcatagtgctgcagcccacagaaatatgcattccccttgcttgtaaagatcctactaggataaactgtgtgcacaaatgaatcgtttatctttgacagttttttttgttaggtctatcctcctgaacccaag

SEQ ID NO: 248 - DNA, 1404 bp, synthetic construct; identical to SEQ ID NO: 242
  source 1..1404: mol_type = other DNA; note = Myb80 coding sequence - OMERI04G13500.4

SEQ ID NO: 249 - protein, 467 aa, synthetic construct; identical to SEQ ID NO: 243
  source 1..467: note = Myb80 protein sequence - OMERI04G13500.4

SEQ ID NO: 250 - DNA, 1107 bp, synthetic construct
  source 1..1107: mol_type = other DNA; note = Myb80 cDNA sequence - OMERI04G13500.5
atggggcgggtgccgtgctgcgagaaggacaacgtgaagcgcgggcagtggacgcccgaggaggacaacaagctgctctcctacatcacccagtacggcacccgcaactggcgcctcatccccaagaacgccgggttgcagcggtgcgggaagagctgccggctgcggtggaccaactacctccggcccgacctcaagcacggcgagttcaccgacgccgaggagcagaccatcatcaagctccactccgtcgtcggcaacaggtggtcggtgatcgcagcgcagctgccggggcggacggacaacgacgtgaagaaccactggaacacgaagctgaagaagaagctgtccgggatgggcatcgaccccgtcacgcacaagtccttctcgcacctcatggccgagatcgccaccacgctggcgccgccgcaggtggcgcacctcgccgaggccgcgctggggtgcttcaaggacgagatgctccacctcctcaccaagaagcgcccctccgacttcccctcgcccgccctgcacgacggcgccggcgccggcgccagcgcgtccgcgctcgccgcgccctgcttccccgccgcgccgccgcaccacccgcaggccgacgacaccatcgagcgcatcaagctgggcctgtcccgcgccatcatgagcgatccctccaccgcctccgccgccgccgccgccaccgccgcccccgcggaggacaaaccgtggccgcccggcgacatgtccgaggggctcgccgggatatacgccacgtacaacccggcggcgcacgcgcaggcccaggccgagttccggtacgacggggccgccgcgccgggctacgtcctcggcggcgacggcgaccagggcacgtcgatgtggagccaccagagcctgtacagcgggagctccggcaccgaggaggccaggcgggcgttgccggagaagggcaacgacagcgtcggcagcagcggcggcgacgacgacgccgcggacgacggcaaggacagcggtgggaagggggcagcctccgacatgtcgggcctgttcgcctccgactgcgtgctctgggacttgcccgacgagctcacgaatcacatggtgtag

SEQ ID NO: 251 - DNA, 1107 bp, synthetic construct; identical to SEQ ID NO: 250
  source 1..1107: mol_type = other DNA; note = Myb80 coding sequence - OMERI04G13500.5

SEQ ID NO: 252 - protein, 368 aa, synthetic construct
  source 1..368: note = Myb80 protein sequence - OMERI04G13500.5
MGRVPCCEKDNVKRGQWTPEEDNKLLSYITQYGTRNWRLIPKNAGLQRCGKSCRLRWTNYLRPDLKHGEFTDAEEQTIIKLHSVVGNRWSVIAAQLPGRTDNDVKNHWNTKLKKKLSGMGIDPVTHKSFSHLMAEIATTLAPPQVAHLAEAALGCFKDEMLHLLTKKRPSDFPSPALHDGAGAGASASALAAPCFPAAPPHHPQADDTIERIKLGLSRAIMSDPSTASAAAAATAAPAEDKPWPPGDMSEGLAGIYATYNPAAHAQAQAEFRYDGAAAPGYVLGGDGDQGTSMWSHQSLYSGSSGTEEARRALPEKGNDSVGSSGGDDDAADDGKDSGGKGAASDMSGLFASDCVLWDLPDELTNHMV

SEQ ID NO: 253 - DNA, 12584 bp, Oryza meridionalis
  source 1..12584: mol_type = genomic DNA; note = Myb80 genomic sequence - Oryza_meridionalis_v1.3:4:19037892:19050475:-1
cccacacagccacactgctttgtagtggcaaatttgcatggcaaatgttcgctgcaattatagtgttctacctcggggacgaattgaccacggttcaatcaggtggcgccatgtctttagccaagctcgccaattcgcacatgcctccattgtcacacacacacatggcaattggcaaaggagccaatcacgacatggtttcaagcgtccctttagagagaaggggnnnnnnnnnnnnnnnnnnnnnnnnnnnnnnnnnnnnnnnnnnnnnnnnnnnnnnnnnnnnnnnnnnnnnnnnnnnnnnnnnnnnnnnnnnnnnnnnnnnnnnnnnnnnnnnnnnnnnnnnnnnnnnnnnnnnnnnnnnnnnnnnnnnnnnnnnnnnnnnnnnnnnnnnnnnnnnnnnnnnnnnnnnnnnnnnnnnnnnnnnnnnnnnnnnnnnnnnnnnnnnnnnnnnnnnnnnnnnnnnnnnnnnnnnnnnnnnnnnnnnnnnnnnnnnnnnnnnnnnnnnnnnnnnnnnnnnnnnnnnnnnnnnnnnnnnnnnnnnnnnnnnnnnnnnnnnnnnnnnnnnnnnnnnnnnnnnnnnnnnnnnnnnnnnnnnnnnngggggaaccaccatcataaatcgatcgcctccagtagaggcagttgagcgacagcgagcctgtctcttaaaaaaataaaattagtcccctccacgcgccgcgtgttcctcgtcctctggttgccaggacagagcacgggggccggcggcgatggcgctcggcgacggggacgacggcgcggccgccgccgttcctctcatctcggatcgccccaagcatgccgccatcgtcagaagcggtgagcgtgcacacgagctccctcaattcgttctgttccgattcttttcttgaatcccctcttcttcttattcttcctggaatccttggtcgatgtgtctgaatgttcgagcagggacggagtggacggcggcggcgcacgtgatcacggcggtgatcgggtccggggtgctgtcgctggcgtggagcgtggcgcagctggggtggctggcggggccggggatgatgctcgtgttcgcggccgtgacggcgctgcagtcggcgctgttcgccgactgctaccggtcgccggacccggaggtcggcccgcaccgcaaccgcacctacgccaacgccgtcgagcgcaacctaggtacgccccaactcgtgatttcatttccctctctctctgtcctaccttcacaagcatcgcacggtatccgtttgattggtggattgggacattagcatttgacttggggaaaaaaaaagaaatagtttcttgccaatttcttctctcgtacgttatttcatctgttcttgagaaagtctttctcgcttaactggtcaccacacacacacggggttattaattatgaaaatgccattcgaacgggatgttatatttgagatatcatcctgtagtattcctctattaattaacctgcgaggagcgacgagactatgtgctgattagcgctatcctaccacgtaaatgtccctgtcaagcaagattggtgaatcgtgggggctaaagcgtaacataaaaaaagaaggaaaaaaaaagtgaggcgcgcgcacacggccatggtcacgggcaccactcggggatgggagaaggctcgtgaattccgcggcgcgcgcggcttgacctcacgcccagggtcgccgccgtccgtccgcagcgcgcagctcactgcacgcacgcgcatctcggggggacgtggcgacgcgcgcgcgcgcggcggcatgcgagttcgtgggtcgaacgcgctcagctcagctggatcagcgagctagcttggctgggtggctgggctggtgcctgctggtgtttgtttcgtgggggagtttggtgtttgggtttgggctggcacggccgcgtgggagaaggtagcgcgtgtaacacattggatggcggcgtgctgaaaaggacaagtgaatacgtgatcgctgctgattcagtaccggtgtccggcgattcggcctgatcttagagccatttaatagtatagctaactactaactctaaatcatttataatcaacttaatagctaattcatacgatagatacatactacactattaatatctggtctcacctgtcatatacacactgcgtctttgagtccgtgctacagctggctacaaatatgtagcccgctgctattctctctcctctattattttcttaaaatatgtttatagctggcttatagcctgctattttacatgctcttagagcaagtttaataatatagccaactattggctccaaatcagatatagttaatctaataacccattcatacaatagttaactataaaaatatactatatcattaatacttggtcccacctctcatacacacgtaacattttagagtccgtgttgcagccgactacaaatttgtagcccgctttcttctctcttctcttttcttctcgatatgtggttatagctggcttataacttgctattgtaccttctctagtggggtcgatatgttaaacaaattttaagaatgaatcatccataggggtggaaacgaggcttggctcggctcggctcggttagggaaacgagctaaaacatgagctcggctcgtttcctggctcgagccagctcgagctgccttgagagccttccgttgaagctatataatttgtaatcattaagaaaagcaataacaaatcatcaacatgtaaaattaaaataactttatatatatatgattcattaaaatctagatataaattaaatattgacaaataataactccactgcaaaataaaatcattcatataaatatatgatggcctaggctcacgagccaaatcaagcggctcgcgagccagctcggctgctcaggcttggctcgtttgagaaacgagctgaaaaggaggcttgggcttggctcgcttggtattcaagccgagccgagctaagcgagctcaagccaagcccgaggtgagctcatgagccaagctttttttccaccctaatcatccaatgattgttcagaataaacaacatttggtcacgcgatgctcgcgcacggaatgttttattgccatgctgccggaggtctcatgccacgccacgggggagctagcatatttattttttaaaagttttgtttaaaaatgtttatattgactttaactatgatatgtaggtacattctcttttcttaagttgaaccagtctacaaagaaaatcttatttaagaatgatgttattgtgttgcaaataaaccaaaattcttgggtgtttcggttgccattgttaaagcaatcaatagataccaaaattctgttttcatccataatcagattttaaggtctgaataacttcccctctacaagagctataggaaaaaaaaatctaaaatataagaaatggtttgagagagtctttctctcgtccttccgcgcacgtgcatttgggagctggcagcctggcacgctccctaactagtggagagtgaaaaggatgggaaagggaattctaggaagctaattaggagaactgttgaaactaagcctaaaattctaagattgaaaccaatattttttttttagaaacacagtacaaacgcaggcgcgcataacatgcgcacactcatccctatgaacgcacacacgcacaccctatccctatgagcacccctggaagactgagccggtatgtcttgagattgacgatgcacactctacccctatgagcacctctggaagactgagccggcatgtcttgagattgacgaagccctatgagcacctccggaagactgagccggcatgtcttgagattgacgacgcacaccctacccctatgagcacctccggaagactgagccggcatgtcgctgtcgacgggtacgtcgcctactactgaaagaataattagccgtaaatgcgagcacccgtgttaaatctaggatttgaacccgatttgaacccgggtgggctggttccaccacaaggaatctaaccagttgctcattcgcagattggaacccatatttggtatctgatgatgtttttatggggtcataaagatatatcatgttctggatggcatattggcaggacaaatccctatcaacatgaacctttgcactattttgttcgggtcgttaaaaaaaattgtttggaaaatttggtacgtgatgttggttttcgctccatcgcccatggctgacgatcactgtgcaacgccggaatattttttgaacaggtagctcgagcgcgtgggtctgcttgttgctgcagcaaacggccttgttcggctacggcatcgcctacaccatcaccgcctccatcagctgcaggtacgccaccccaccttcacgccacgcctttacatttgccgcactacgcattttccacttcttattgtgcgcgcaagcaagtacaccgaattgccgatgatgtttgatatttttcatcgcttagttacctcgagcgtcatcgatttcacgtccccctttcgcggacgatttcagtttccttcccgtttcacgtctccctttcgcatgcgggccgctgttccgcctcggttgcctgggccctgacgccgcgggctgtggctagctggatcggcacaccaacggtccaacgcttcaaggcccgactagtgttgcggatgcatggcccaacaggagcaaggcccaagcttttaatcctgagttcaccgcaatacggccccgatcgtcgatcgaggccccgggaagagtggaagaccacatgatcacctcaccatcgccaaagccaaaccagaatagtggagtagtagcagctttctgcctagatccggatccgggtcgttttcccccgtgtctcgttgccaagttcaagggaaaagctgagcccaactcgacggcggttgccttcggttttggcatcgtctgtttgatgcgtagcgagccagagaatgccacggagaaatctgccccgcagggtagttttctcgagccttgcagaaactcaccccaagtcaacggaacagcttaaaagaaataatttttttcttgttttttcttcccggttacatggaagacacacatgtaccagcacatgctcagatagactgtgatttgatcccatggcagcccaaaacggctgcagagggcagcagctaaaaatggccgcggccgcagccgcagcagctacaacagccggcgtttctgatcagcctaggtgtttcttcatattctttgtttctttaaaaaggtcaaacactaaagagaaaaaagagccctctacatcaaatgggcaaattatcaaccacatctaaaaaattaaaatttatacttagttttgaggttttctattgtattttattttttagcatttatttttaaatcacaaataatataggtataaaagtatagccagcattttgcttcgttctcttttccatggctcagcagctaagaaaaattgaactctaaaattcctacattttttttatcatttttgcaccctttcttattttaaaatcagacgcctacatcagtcgaaacccaaacccaaaacagaatagatcaagcgaatgccatcctcctccatttcatttcagctccagcccgctaacaccactccgccaccgcccactataaattgtctggtggtgctcctaagcttgttgaattggcggcgagctgatttcgagtgtgaacctgaactttgctgataaattcattaataatgcgtccaagagagaaacgtccagggattttttgggttagttccataaggtggtgggctaaccggcctgagtttggagcctcatccattttatttatttgatattagatcattccctaatactcacgttttaataatgcatccaaaatggagtggatagcaccaaattagtaccgaatgaccaagacgggttattggctctatgctgctttttttgacaagaaatggaatcctggacggtccaaaattttcccagagggtggcaaaagcctccacggggagtcgactagtcgaggaccatgacaactactgtacaatgccgattgcaaaatgcaaagtcaataaaggattctttctacaaacaatgtcaaaagaggagatatatatgcatcgttgctttgggggacgcaaaatacttttgaaaagttacgtatctgtacaggttaatttcgtacatcatacttactaccagtcatgagctaccaactctggagatgacaatcccttcatttctctaccgtttcctccttcaaaattcttatcatctgtgactttgtgtcctggttacctcatcgagccaacatcaagtaatcacgcttattcccacaattcactagcgtgggactaccttcacatcacggccaccgatccaatcacgtccacgaaccaatcttttttcctttttaaagatcttttcggtggaactcggttttcaacacaatagatgtgtgtcctttttttttttttgagaacgatatgtgtcctgagcaacgataaagccggtacgtacgatggggacacgaggatgattggtgttgggcagccaccaaattggtgccaaattggcaattaggcttgcgcatgcagtttcgtgcaggaggcacagcaaatctcgtgacaaatgaatgctgaaacgtgcactccgtgctctcgtggacgggggcccgtcggcatgtcggcccatatgccttttcgactcgggacacagttaccgcttcctgttccttgatcttgggctacctttccactctttatgagccgttttatcttcgaatccaaatgctactaccaagttctgccaaaacaagaacagggataagatttgctccataatagtactaatataatatatccacatgcaaatggcattcatgtgacaagtccggagaagacctgtgtacctcaacgcggatcctggttattaatccattccaaaaccatagtaaaacagtgatactaataattaatatgtgtacggtgtcgaggcagccgcgcttttcgccccgaaaaaaggggggggtcgcggattcgatccgagtccaagagaatcggacaaagccgtgacagcaacggcctagtgatccaaagctaagtagtcgtagtagtcgtagccatcggcgcggtggtctcatcagcagcggatcgctcgatcgattgccttatacctccacgtctcgccgtccgtctccaaccccaaccccacccactgatcctgcagctagcctcttctcccgtcgcgcggcgaaccaggcgcaatggcggtgcaccactccctcgaggtggccgccgcaggaggcgacggcagcggcggccgatgctacgacgacgacggccacccggcacgcaccggtacggtacacacgcgctcgttgttccctgaacccagcgcgctgatctgaatccatccatgcgtgcgtgcgtgcgacgacgcgcgcgcgggcgggggcgaatggtgtggcgtgcgtgcagggacggtgtggacgtgcgtggcgcacatcatcacggcggtgatcgggtccggggtgctgtcgctggcgtggagcgtggcgcagctcgggtgggtgggcgggccggcctgcatggtgtgcttcgcgctcgtcacctacgtctccgccgcgctgctctccgactgctaccgccgcggcggcgacgacgacaagggcccccggagccgatcctacatggacgccgtccgcgccttcctcggtaaaagctagtagtgatctaccgtgcaaaccaaaccaaacttcgcgttcgcgaattgctcgctgcacactcgggctaaatcctgtactctctctctctctctctctctgtgcgcacatggcgcggggaattaacgtgctcaggcaagaagcacacctgggcctgcggcttgctccagtacgcgagcctgtacggctgcggcgtcgcgtataccatcaccaccgccactagcatgaggtagtggcagctagcccaagaatcgatgtgcagggagaaacgtgatggatgctgcattacgagttttttgcagcgtggtgtttgtgtttctgtttcttccgttgatttttttttcgggttttggtgtgtttttttgcagggcgatcctgaggtccaactgctaccacacgcacggccacgacgcgccctgcaaatacgggggcagctactacatgctcgtgttcggcgccgcgcagctgttcctctccttcattccggacttccatgacatggcgtggctgtcggtccttgccgcggtcatgtcgttctcctactcgttcatcggcctcggcctcggcctcgccaacacaattggtacgcgctgctttggttccagaatccaatctgttcatcctttgagctgctcagtcgtagtaactagtacatttacatgttctgcgagactatatggtataactgagacatttagtttgtgaagattgagattatataaagctgacaaacctgttgctgttcttcagctaatggaacgatcaaaggaagcataacaggtgctccaacgagaacccctgtgcagaaggtctggcacgtctcgcaggccatcggtgacatcgcattcgcgtacccgtactcattaatcctcttggaaattcaggtgcgtacatacatctcgtccatctgagagtctgaaattctgaagtacaacaggacagtcgctgacgaatttcttccgtacgttacgcttgcgtgtgctggtgcaggacaccctgaaggctccaccggccgagaacaagacgatgaagaaggcgtccatcatctcgatcgtcgtcaccaccttcttctacctctgctgcggctgcttcggctacgccgccttcgggagcgacgccccaggcaacctcctcaccggcttcggcttctacgagccctactggctcatcgacttcgccaacgcctgcatcatcctccacctgctcggcggctaccaggtacacatgacaacaccaagaaaccatttcagtgtgccactgatcgaacacagtcagtcgatgacattgccggatgatgatgaatgaaaaaaaaaacttggtttgatcaggtgtacagccagccgatataccagttcgcggacaggttcttcgcggagaggtacccggcgagccggttcgtgaacgacttccacacggtgaagctgccgctgctgccgccgtgtcgggtgaacctcctgcgggtgtgcttccggacggtgtacgtggcgagcacgacggcggtggcgctcgccttcccctacttcaacgaggtgctcgcgcttctcggcgccctcaacttctggccgctcgccatctacttccccgtggagatgtacttcatccagcgccaggtcccccggtggtcgccccggtgggtcgtgctgcagtcgttcagcgtcctctgcctcctcgtcagcgccttcgcgctcgtcggctccatccagggcctcatcagccagaagctaggctaaagatttagtctagcatcctgaattcggatttgctttttctttgtgtaaccgtaatgggatgagaatgcattggtggtcgtgtgttgtttgtaacaactggggagcggagctttgtccctggtgaatggcgcgatgaactcatgaacaatagcatagtggtggtggtacattgtgtctgcaggggtcagagggtagtggcactatgtttttcagtgcctttcctcctgtgctgcagagaaactgctcctatatatgtacagaatgtcgtcatattattgccatgatacttggaacggtgaaaggaacctgctcttgaatgatgtataaatcagagagagaaaaaaagactgctcagtactgtgcttatctatcagattcgtagagctcggtatgcatcgattaattggtttcaggttgcgttggcattgagcatgcgtaagccatgtatctgctttgggtgattttactgaaatggtgggaaaagaacatgattcagggtgttcttggaactggcagccgctggcctttgtgttcttgatgataaggattggggaataaaatagcatcctcatatcaagagtgtaatcaactaatcatagtgctgcagcccacagaaatatgcattccccttgcttgtaaagatcctactaggataaactgtgtgcacaaatgaatcgtttatctttgacagttttttttgttaggtctatcctcctgaacccaaggctgtaaatttgtttagacaaaggatcattactcatacccctgcttatgttcacaaggttttatattactgaatagtggtgtttcatctagcaacattagtgaatagctgcagtgccagactgcccagtgtgcaggggcgtcagtgagcgagatggcgaggcgagaacgcgagcggcgccgggaggccgcggcttggaccgtggccgtgggggggttgacccggcgctgcgcgggtgggcaacctgtcccgcccccccggggggaggctcacgcgttgcgcgggcgttgaattctttatgccgcccatgccgccttcgccccccccctgcgggcgcgcgcgcccaatcgccggcgcggcagcgcgcgcgcgcgcgcgcgcgggcggtcgcgaggccgcgagcctatttatacacgcggcgcggccgtgtgagcgccgcacgcacgcacgcacgcagcagcggaatctcgacggcgggggtgggcggcgacgacatcatggggcgggtgccgtgctgcgagaaggacaacgtgaagcgcgggcagtggacgcccgaggaggacaacaagctgctctcctacatcacccagtacggcacccgcaactggcgcctcatccccaagaacgccggtacgttggggcgaacgcgtggttgagcagcggtggctgtggcgctctgaccggggtgtttgctgctggaacgttggcagggttgcagcggtgcgggaagagctgccggctgcggtggaccaactacctccggcccgacctcaagcacggcgagttcaccgacgccgaggagcagaccatcatcaagctccactccgtcgtcggcaacaggtaggcatcaacgaatgatctcgctacaccgtcttgtgatcttggtcatttttggagaaatgtattgagcaatgcgggatggggctgtgtgtggcaaggtggtcggtgatcgcagcgcagctgccggggcggacggacaacgacgtgaagaaccactggaacacgaagctgaagaagaagctgtccgggatgggcatcgaccccgtcacgcacaagtccttctcgcacctcatggccgagatcgccaccacgctggcgccgccgcaggtggcgcacctcgccgaggccgcgctggggtgcttcaaggacgagatgctccacctcctcaccaagaagcgcccctccgacttcccctcgcccgccctgcacgacggcgccggcgccggcgccagcgcgtccgcgctcgccgcgccctgcttccccgccgcgccgccgcaccacccgcaggccgacgacaccatcgagcgcatcaagctgggcctgtcccgcgccatcatgagcgatccctccaccgcctccgccgccgccgccgccaccgccgcccccgcggaggacaaaccgtggccgcccggcgacatgtccgaggggctcgccgggatatacgccacgtacaacccggcggcgcacgcgcaggcccaggccgagttccggtacgacggggccgccgcgccgggctacgtcctcggcggcgacggcgaccagggcacgtcgatgtggagccaccagagcctgtacagcgggagctccggcaccgaggaggccaggcgggcgttgccggagaagggcaacgacagcgtcggcagcagcggcggcgacgacgacgccgcggacgacggcaaggacagcggtgggaagggggcagcctccgacatgtcgggcctgttcgcctccgactgcgtgctctgggacttgcccgacgagctcacgaatcacatggtgtagctaagctataaaacgcgggaaaactttgcacggcgaagcacgccatgatccacatcacttgcagttgcaggtggtgagaattggaaagaacgaaaaattgctaccaataatattgctgaaagagtgacagaaaaagtgaaaaactatagtatgtagctggcaagaaaaatggggattttttttgcttggaaaagagagaaaaaaagtgagatgtgaatagttttaccgagaagcactgattgattgagtgattgagccggaggccagaggatggattctaatatctcggatggacgtccacccgtttcttgcatgccacttaaatgattatgaaaaaattccaaaaaaaattcacaagataggttaatatgtaatatatcacttcacaaacatacaagttcaaattcgacttctacaacttataacaaaaataacaaatcaaactctaactagtatacgtatattaacagtcaaatttattatttttgttacgacttgtagaagtcgagtttgaacttgcatgtttgtgaagtgatatattacatattaatctatcatgttaatttttttgaaaatttttcataactatttagataatat

SEQ ID NO: 254 - DNA, 1437 bp, synthetic construct; identical to SEQ ID NO: 186
  source 1..1437: mol_type = other DNA; note = Dwarf11 cDNA sequence - ONIVA04G13750.1

SEQ ID NO: 255 - DNA, 1437 bp, synthetic construct; identical to SEQ ID NO: 186
  source 1..1437: mol_type = other DNA; note = Dwarf11 coding sequence - ONIVA04G13750.1

SEQ ID NO: 256 - protein, 478 aa, synthetic construct; identical to SEQ ID NO: 188
  source 1..478: note = Dwarf11 protein sequence - ONIVA04G13750.1

SEQ ID NO: 257 - DNA, 5046 bp, Oryza nivara
  source 1..5046: mol_type = genomic DNA; note = Dwarf11 genomic sequence - Oryza_nivara_v1.0:4:16129366:16134411:-1
gcagcagcagcctagatgctagctactctgcattggaccatcctcctagtcctaggctgtaggctcatagccctccttgataaaagctacgactggcacagtatatgcatgcagccaattcacttcactgcagtaaaaaaaaaaaagaaaacagagagaaacagagatcaaacaatgcaagaaagaaatacccctacttctactttaaaacaaggccaaagcaaggaaacaaaaggcagcctctattttttttccctcccccccccccccccctcgctcatcacccctttccatcactccctccctttgcaaagatccttcctgcctttgcttctactgctatatagcctcccccctcaccttccattccagagaaaaatagagggagggagagggagagaagcagagtgttgagcacaagctagtgaaagggttagatagaaacttggtagaatagacagatagggagagagagagagagagagagcttagcaagctaaggcttagctgctgcaaggctccatatgcttcttgttgtgagatgagattgagataagatgagcagggggtggtggtgcctggtgtgaggctataggtaagatggtgggaggagagcttgtgctggctgctctggtgatcctgcttgctttgctcctgaccctggtgctgagccacttcctgcctttgctcctgaatcccaaggctcccaagggaagctttgggtggcctctccttggtgagacgctgaggttcctcagtcctcatgctagcaacaccctgggcagcttcctggaggatcactgctccaggtaaattaaaatcatatgcagtaaacatttctatcagtatcaccaccacaaccacacaggagcaacaagtgtcatcttaccatgcaattaagtactgtaccattatttcatgtgacagcaaaaggtaatgctgctgtcctgtcccagcagctttatcacgccctttttcttcctccctgatgaggggggtgctgtaacatgaattggacagtgtttagcatcttgttaaagagttgtgcaaaccttttcttccgatgaacaagcgagagaaaaggaatgtaaaggttgcacaacacttaactagctagcatgcatggtggtagtaacactgatgatggtgtgatgatgatgatgcaggtatgggagggtgtttaagtcccatctgttctgcacccccaccatagtgtcctgtgaccaggagctgaaccacttcatccttcagaatgaggagaggctgtttcagtgcagctaccccaggccaattcatggcattctgggcaagtcctccatgttagtggtcctaggggaggaccacaagaggctcaggaaccttgctctagcactggtcacctccacaaagctcaagcccagctaccttggcgacattgagaagattgcactgcatatagttgggtcatggcatggcaagagcaaggacaaggggatggtcaatgtcatcgccttctgcgaggaggcaagaaaggttagcaagtgtactaacttgaaaccagagccatatcaccacaaggacatgatcccttgaaacaagggagggaaaactttgcacatgttagctacataccatcatcatcatgttgttacttgctgctgcatgaatctttgtcccaaggtcactttgacttaccatggtcttttttaccttttcttttttttttctctctctggtgtgctctctttccttgagaaccacagtttgcattcagtgtaatagtgaagcaggtgctggggctatcaccagaggagccggtcactgccatgatacttgaagatttcctcgccttcatgaagggtctcatctctttccctctctacatcccagggacgccctatgccaaagctgtgcaggcatgcaactcaacatctcatttacacaagtcgttaaattgtcaataaaattttcaggccattttatttttgtatacttaccgtaataacttcatccttttgtccgcgaatcctcacaggccagagcgaggatatcaagcactgtgaagggtattattgaggagaggaggaatgctggctccagcaacaagggtgatttccttgatgtgctgctttcaagcaatgagctctctgatgaggagaaagtgagctttgtgctggattccttactgggaggatatgagaccacctcactcttgatctccatggttgtgtatttccttgggcagtcagctcaagatctggaactagtgaaggtatacagacttctcatgctgaaaaagacagagcagtactggtaaataagtacttaattaagtggccatcaataaaatatatattaacatgtttgcatgcagagggagcatgaaggcataagatcgaagaaagagaaggacgagttcttgagctctgaagactataagaagatggaatatacccaacatgtaagatgatcgttccatacatgctttaggattagttagtaagccaggggtacctttttttcctattatcagcaactacacaaatatgtgaccctccaaatatgaggtttactcatattcagaacgattctcctatgcctacccatatgtgcaatttttgaattaagcaaaaaaaagaaaaagaaacagagagagaaagaatctcattacaatagagtgaaaagggcggaagggacatgttcttcaataatggaaactgtatgatgatgcatatgctatgcccttacaggttatcaatgaggcactgagatgtggcaacattgtcaagtttgtccacaggaaggctctcaaagatgtcagatacaaaggtaattaaccctacttgaggctttccttgaagattccattgtgctcaacacatgataatggatcaggcaaagtggatggttgcacctttattactgatttttaagcattgttattcctaaaatacctcagcttttcatagaagatgctcaaaagcaagtggctcttttttctttgctctgttgcagagtatctgattccttctggttggaaggtcctacctgttttcagtgctgttcatttgaaccccttacttcatggaaatgcccaacaatttcagccctgcagatgggaggtacgtttgtttccataatctgtgaatgctccgcaatacttactaaatgtttattgttaatgacctaatgaaaaatgttttggaccagctaggccacgaagcttagctttcacgtagtatacttttctataatacaaatttataaaatgaaaagttcagagcacctatcaagagagcttatctggagccttgaaagaatcttctttaaagggtgttctctaactaattgctacctttaattagtgagcgcccaactatgacataattactcgcaactattctggtgtcttcagatgccaaacaagctccctgtggctgcaatgccttttgtgcatggtcctaaccatgattcctctcattcaaagccagcattcttggctttgcttccttttcttagtttctgtgatgaagctaatggtctgattcatgtgtgttcctaatctgattgatgcaacagggtgcaagccaagggacaagcaagaagtttacgccgttcggcggtggcccccggctctgccctggatcagagcttgcaaaagtagaggctgctttcttcctccatcaccttgtgctcaattataggtaaaacaaaagggtatatttgtcctacccgagtagaagatgcatggatcaaagttgactggcttaaacagcaatgaacaaaatacgttcagaagtaatatttaagaagctggtgcagagtagttggtgtttaaataggccatagaaaactgttgaggcaaacatgaacaggaaaacatactgatgcagttaccactctcatactgataatacacactacactagaccactagtaagtaatggcaagaaggccatgacagcaactaggcaaattatttatgtttttgtctgtaaggaccgcaagtctgaactcagctatcttgtgcattttcataagtggcactgtagagcatagaatcagacgacaacacacagaacaaacatgacagcatggagttttcgataggtaggctatgcaagttgagttgagggctgccatacaagataaaatatactaccacgatatgatcaaactctttttttttaaaaaaaaactaggttcattagcaacaatctatacgtgacaactgacaagaacaggcagatttatgtaaattatgcggttgtttcagagtagagtctacatgtacttactgaatatccatgccagagaaaggctgatcatcgttcttcgtttctttcgtttcttgaaaacctgtgcagatggagaatcgatggcgatgacattccgatggcatacccgtacgtggagttccagagaggtctgcccatagaaatcgagccactttgctctgaatcctgacaggtttgcagttgcagccacggtgagcgagttcatcaaatcatccccgcaagcgagggggagatgcgggcgagaacgacggactgagaggattagtcagtgaaacaaaaaaaggagagaaaatatttcaagaactgaagaaatgcactgagcattagctagtagtacctatcaatgagccaagctgagattgtaatttgctgtacatggtgtagatatattttgtccatgccgattgcttgcggtggtggtggtgcggtgcttcaccctgtaacatcctccactgtttcaactttcatctgctattctatagaagaaaaaaaaaagaagaaaattgggctattgggctattgaaaagattttggatgaagccaaagatcttcaaaaacaaatcattgaaactttgaaagagtactcctatcctttaataatatgaacatgaacatgtatggactgtactctgcactacttctcagggaatttcggagcagacaaattcgatcgtggataatccctatcaatcggagatggctggtcccgtttggattggaggaatttctgaaggaatcctttcctgcatgggaaatcttagtttcagtg

SEQ ID NO: 258 - DNA, 1122 bp, synthetic construct
  source 1..1122: mol_type = other DNA; note = Myb80 cDNA sequence - ONIVA04G13800.1
atggggcgggtgccgtgctgcgagaaggacaacgtgaagcgcgggcagtggacgcccgaggaggacaacaagctgctctcctacatcacccagtacggcacccgcaactggcgcctcatccccaagaacgccgggttgcagcggtgcgggaagagctgccggctgcggtggaccaactacctccggcccgacctcaagcacggcgagttcaccgacgccgaggagcagaccatcatcaagctccactccgtcgtcggcaacaggtggtcggtgatcgcggcgcagcttccggggcggacggacaacgacgtgaagaaccactggaacacgaagctgaagaagaagctgtccgggatgggcatcgaccccgtcacgcacaagtccttctcgcacctcatggccgagatcgccaccacgctggcgccgccgcaggtggcgcacctcgccgaggccgcgctggggtgcttcaaggacgagatgctccacctcctcaccaagaagcgcccctccgacttcccctcgcccgccgtgcacgacggcgccggcgccggcgccagcgcgtccgcgctcgccgcgccctgcttccccgccgcgccgccgcaccacccgcaggccgacgacaccatcgagcgcatcaagctcggcctgtcccgcgccatcatgagcgatccctccaccgcctccgccgccgccgccgccgccgccgcgccctccgcccccgcggaggacaagccgtggccgcccggcgacatgtccgaggggctcgccgggatgtacgccacgtacaacccggcggcgcacgcgcacgcgcaggcccaggccgagttccggtacgacggggcctccgcggcgcagggctacgtcctcggcggcgacggcgaccagggcacgtcgatgtggagccaccagagcctgtacagcgggagctccggcaccgaggaggccaggcgggagttgccggagaagggcaacgacagcgtcggcagcagcggcggcgacgacgacgccgcggacgatggcaaggacagcgggaagggggcagcctccgacatgtcgggcctgttcgcctccgactgcgtgctctgggacttgcccgacgagctcacgaatcacatggtgtag

SEQ ID NO: 259 - DNA, 1122 bp, synthetic construct; identical to SEQ ID NO: 258
  source 1..1122: mol_type = other DNA; note = Myb80 coding sequence - ONIVA04G13800.1

SEQ ID NO: 260 - protein, 373 aa, synthetic construct
  source 1..373: note = Myb80 protein sequence - ONIVA04G13800.1
MGRVPCCEKDNVKRGQWTPEEDNKLLSYITQYGTRNWRLIPKNAGLQRCGKSCRLRWTNYLRPDLKHGEFTDAEEQTIIKLHSVVGNRWSVIAAQLPGRTDNDVKNHWNTKLKKKLSGMGIDPVTHKSFSHLMAEIATTLAPPQVAHLAEAALGCFKDEMLHLLTKKRPSDFPSPAVHDGAGAGASASALAAPCFPAAPPHHPQADDTIERIKLGLSRAIMSDPSTASAAAAAAAAPSAPAEDKPWPPGDMSEGLAGMYATYNPAAHAHAQAQAEFRYDGASAAQGYVLGGDGDQGTSMWSHQSLYSGSSGTEEARRELPEKGNDSVGSSGGDDDAADDGKDSGKGAASDMSGLFASDCVLWDLPDELTNHMV

SEQ ID NO: 261 - DNA, 2512 bp, Oryza nivara
  source 1..2512: mol_type = genomic DNA; note = Myb80 genomic sequence - Oryza_nivara_v1.0:4:16169880:16172391:-1
gctgcagcccatagaaatatgcattccccttgcttgtaaagatcctactaggataaaactgtgtgcagaaatgaatcgtttatctttgacagttttttttttctttttgagtctatcctcctgaacctaaggctgtagatttgttcggacaaaggatcattactcatagcctgctatgttcacaaggttttatattactgaatagtggtgtttcatcaagcagcattagtgaatagttgcagtggcagtgtggtgcagggcgtcagtgagcgagatggcgaggcgagaacgcgagcggcgccgggagcgcgcgaggcttggaccgtggccgtgaggggggttgacccggcgctgcgcgggtgggcaacctgtcccgcccccccggggggaggctcacgcgttgcgcgggcgttgaattctttatgccgcccatgccgccttcgccccccgtgcgcgcgcgcgcgcgcccactcgccggcgcggcagcgcgcgcgcgcgcgcgggcggtcgcgaggccgcgagcctatttataacacgcggcgcggccgtgtgagcgccgcacgcacgcagcagcagcggaatctcgacggcggcgacatcatggggcgggtgccgtgctgcgagaaggacaacgtgaagcgcgggcagtggacgcccgaggaggacaacaagctgctctcctacatcacccagtacggcacccgcaactggcgcctcatccccaagaacgccggtacgttggcgcgcgcgccgccaccggcgaacgcgtggttgcagcagcggcggcgctctgaccggggtgtttgttgctggaacgttggcagggttgcagcggtgcgggaagagctgccggctgcggtggaccaactacctccggcccgacctcaagcacggcgagttcaccgacgccgaggagcagaccatcatcaagctccactccgtcgtcggcaacaggtaggcatcaacgagtggtctcgctacaccgtcttgtgatcttgggtcatttttggaggaatgtattgagcaatgcgggatggggctgtgtgtggcaaggtggtcggtgatcgcggcgcagcttccggggcggacggacaacgacgtgaagaaccactggaacacgaagctgaagaagaagctgtccgggatgggcatcgaccccgtcacgcacaagtccttctcgcacctcatggccgagatcgccaccacgctggcgccgccgcaggtggcgcacctcgccgaggccgcgctggggtgcttcaaggacgagatgctccacctcctcaccaagaagcgcccctccgacttcccctcgcccgccgtgcacgacggcgccggcgccggcgccagcgcgtccgcgctcgccgcgccctgcttccccgccgcgccgccgcaccacccgcaggccgacgacaccatcgagcgcatcaagctcggcctgtcccgcgccatcatgagcgatccctccaccgcctccgccgccgccgccgccgccgccgcgccctccgcccccgcggaggacaagccgtggccgcccggcgacatgtccgaggggctcgccgggatgtacgccacgtacaacccggcggcgcacgcgcacgcgcaggcccaggccgagttccggtacgacggggcctccgcggcgcagggctacgtcctcggcggcgacggcgaccagggcacgtcgatgtggagccaccagagcctgtacagcgggagctccggcaccgaggaggccaggcgggagttgccggagaagggcaacgacagcgtcggcagcagcggcggcgacgacgacgccgcggacgatggcaaggacagcgggaagggggcagcctccgacatgtcgggcctgttcgcctccgactgcgtgctctgggacttgcccgacgagctcacgaatcacatggtgtagctaagctataaaacgcgggaaaacttagcacggcgaagcacgccatgatccacatcacttgcagttgcaggtggtgagaattggatagagcgaaaaattgctaccaataatattgctgaaggagtgatagaaaaagtgaaaaactatagtatgtagctggcaagaaaaatggggattctttttgcttggaaaagagaaaaaaaaagtgagatgtgaatagttttaccgagaagcactgattgattgagtgattgagccggaggccaaggtatttttccagtcctctgcttcagtcgcactccatgagcaatggataattcaattcagttcagacagattgtttacttcttccatggatcatattgtctgatgatgaggttgatgggaaaacgtcaatatgcaactctagcatgttatataaatggtcatgaaaattcagagaaaaaaaaatctataacaacgctgcacccaaaaagattgtgtgctgtctaaacttcagaaaatcatgtgaaatttctgaattttaaccatgagttgcacaactgtaccaaagaaggctagaacccagaaataaaacctgtggatctgacattttgatag

SEQ ID NO: 262 - DNA, 1437 bp, synthetic construct
  source 1..1437: mol_type = other DNA; note = Dwarf11 cDNA sequence - OPUNC04G13510.1
atggtgggaggagagcttgtgctggctgctctggtgatcctgcttgccttgctcctaaccctggtgctgagccacttcctgcctttgctcctgaatcccaaggctccaaagggaagctttgggtggcctctccttggcgagacgctgaggttcctcaggcctcacgctagcaacaccctgggcagcttcctggaggatcactgctccaggtatgggagggtgtttaagtcccatctgttctgcacccccaccatagtgtcctgtgaccaggagctgaaccacttcatccttcagaatgaggagaggctgtttcagtgcagctaccccaggccaattcatggcattctgggcaagtcctccatgttagtggtcctaggggaggaccacaagaggctcaggaaccttgctctagcactggtcacctccacaaagctcaagcccagctaccttggcgacattgagaagattgcactgcatatagttgggtcatggcatggcaagagcaaggacaaggggagggtcaatgtcatcgccttctgcgaggaggcaagaaagtttgcattcagtgtaatagtgaagcaggtgctggggctatcaccagaggagccggtcactgccatgatacttgaagatttcctcgccttcatgaagggtctcatctctttccctctctacatcccagggacgccatatgccaaagctgccagagcgaggatatcaagcactgtgaagggtattattgaggagaggaggaatgctggctccagcaacaaaggtgacttccttgatgtgctgctttcaagcaatgagctctctgatgaggagaaagtgagctttgttctggattccttactgggaggatatgagaccacctcactcttgatctccatggttgtgtatttccttgggcagtcagctcaagatctggaactagtgaagagggagcatgaaggcataagatcgaagaaagagaaggatgagttcttgagctctgaagactataagaagatggaatatacccaacatgttatcaatgaggcactgagatgtggcaacattgtcaagtttgtccacaggaaggctctcaaagatgtcagatacaaagagtatctgattccttctggttggaaggtcctacctgttttcagtgctgttcatttgaaccccttacttcatggaaatgcccaacaatttcagccctgcagatgggagggtgcaagccaagggacaagcaagaagtttacgccgttcggcggtggcccccggctctgccctggatcagagcttgccaaagtagaggctgctttcttcctccatcaccttgtgctcaattatagatggagaatcgatggcgatgacattccgatggcatacccgtacgtggagttccagagaggtctgcccatagaaatcgagccactttgctctgagtcctga

SEQ ID NO: 263 - DNA, 1437 bp, synthetic construct; identical to SEQ ID NO: 262
  source 1..1437: mol_type = other DNA; note = Dwarf11 coding sequence - OPUNC04G13510.1

SEQ ID NO: 264 - protein, 478 aa, synthetic construct
  source 1..478: note = Dwarf11 protein sequence - OPUNC04G13510.1
MVGGELVLAALVILLALLLTLVLSHFLPLLLNPKAPKGSFGWPLLGETLRFLRPHASNTLGSFLEDHCSRYGRVFKSHLFCTPTIVSCDQELNHFILQNEERLFQCSYPRPIHGILGKSSMLVVLGEDHKRLRNLALALVTSTKLKPSYLGDIEKIALHIVGSWHGKSKDKGRVNVIAFCEEARKFAFSVIVKQVLGLSPEEPVTAMILEDFLAFMKGLISFPLYIPGTPYAKAARARISSTVKGIIEERRNAGSSNKGDFLDVLLSSNELSDEEKVSFVLDSLLGGYETTSLLISMVVYFLGQSAQDLELVKREHEGIRSKKEKDEFLSSEDYKKMEYTQHVINEALRCGNIVKFVHRKALKDVRYKEYLIPSGWKVLPVFSAVHLNPLLHGNAQQFQPCRWEGASQGTSKKFTPFGGGPRLCPGSELAKVEAAFFLHHLVLNYRWRIDGDDIPMAYPYVEFQRGLPIEIEPLCSES

SEQ ID NO: 265 - DNA, 5034 bp, Oryza punctata
  source 1..5034: mol_type = genomic DNA; note = Dwarf11 genomic sequence - Oryza_punctata_v1.2:4:21171295:21176328:-1
tctctctacctgcgtgtttgactgcaccttgagcagcagcagcagcagcagcctagatgctagctactctgcattggaccatcctcctagtcctaggctgtaggctcatagccctccttgataaaagctactactggcacagtatatgcatgcagccaattcacttcactgcagtaaaaaaaaataatgagaaagaaacagagatcaaacaatgcaagaaagaaatactcctacttctactttagtctttaaaacaaggccaaagcaaggaaacaaaaggcagcctcattttttttcccttccccctgctcatcaccctttccatcactctctccctttgcaaagatccttcctacctttgcttctactgctatatagcctcccccctcaccttccattccagagaaaaatagagggagagggagaagcagagtgtgagcacaagctagtgaaagggttagatagaaacttagtagaatagacagatagtcagagagagcttagcaagctaggctgctgcaaggctctatgcatcttcttgtgagatgagattgagatgagcagggggtggtggtggtgcctggtgtgaggctaggtaagatggtgggaggagagcttgtgctggctgctctggtgatcctgcttgccttgctcctaaccctggtgctgagccacttcctgcctttgctcctgaatcccaaggctccaaagggaagctttgggtggcctctccttggcgagacgctgaggttcctcaggcctcacgctagcaacaccctgggcagcttcctggaggatcactgctccaggtaaattaaaatcatatccagtaacatttctatcagtatcaccaccaccaccaccaccaccacacaggagcaacaagtgtcatcttaccatgcaattaagtactgtaccattatttcatgtgacagcaaaaggtaatgctgctgtcctgtcccagcagctttatcatgccctttttcttcctccctgatgggggggctgtaacatgaattggacagtgtagtagagttaaagagctgtgcgaacttttcttccgatgaacaagtgagaaaaaaaggaatgtaaaggttgcacaacactaacacttaactagcatgcatggtggtagtaacactgatgatggtgtgatgatgatgatgcaggtatgggagggtgtttaagtcccatctgttctgcacccccaccatagtgtcctgtgaccaggagctgaaccacttcatccttcagaatgaggagaggctgtttcagtgcagctaccccaggccaattcatggcattctgggcaagtcctccatgttagtggtcctaggggaggaccacaagaggctcaggaaccttgctctagcactggtcacctccacaaagctcaagcccagctaccttggcgacattgagaagattgcactgcatatagttgggtcatggcatggcaagagcaaggacaaggggagggtcaatgtcatcgccttctgcgaggaggcaagaaaggttagcaagtgtactaacttgaaaccagagccatatcaccacaaggacatgatcccttgaaacaaggagggaaaactttgcacatgttagctacataccatcatcatcatgttgttacttgctgctgcatgagactttgtcccaaggtcactttgacttaccatggttgtttttaccttttcctttttttttctctccttggtgtgctctctttccttgagaagcacagtttgcattcagtgtaatagtgaagcaggtgctggggctatcaccagaggagccggtcactgccatgatacttgaagatttcctcgccttcatgaagggtctcatctctttccctctctacatcccagggacgccatatgccaaagctgtgcaggcatgcaactcagcatctcgtttacataagtcgttaaactgtcaataaatttttcaggccattttatttttgtatacttaccataataacgttcatccttctgtctgtgaatcctcacaggccagagcgaggatatcaagcactgtgaagggtattattgaggagaggaggaatgctggctccagcaacaaaggtgacttccttgatgtgctgctttcaagcaatgagctctctgatgaggagaaagtgagctttgttctggattccttactgggaggatatgagaccacctcactcttgatctccatggttgtgtatttccttgggcagtcagctcaagatctggaactagtgaaggtatacagacttctcatgctgaaagacagagcagtactggtaaataagtacttaattaagtatccatcactaaaatatatattaacatgtttgcatgcagagggagcatgaaggcataagatcgaagaaagagaaggatgagttcttgagctctgaagactataagaagatggaatatacccaacatgtaagatgatcgttcaatacatgctttaggattggttaataagccagaggtaccttttttcctattatcagcaactacacaaatatatgaccctccaaatatgaggtttagtcatattcagaccgattctcctatgcctacccatatatgcaatttttgaattaaacaaaaaaagaaaaataaaaagcagagagagaaagaatctcattacattagagtgaaaagggaagaagggacatgttcttcaataatggaaactgtatgatgatgcatatgctacgcccttacaggttatcaatgaggcactgagatgtggcaacattgtcaagtttgtccacaggaaggctctcaaagatgtcagatacaaaggtaattaaccctacttgaggctttccttgaagattccattgtgctcatcacatgataatggatcaggcaaagtggatggttgcacctttattactgatttttaagcattgttattcctaaaatacctcagcttttcatagaagatgctcaaaagcaagtggctcttttttctttgctctgttgcagagtatctgattccttctggttggaaggtcctacctgttttcagtgctgttcatttgaaccccttacttcatggaaatgcccaacaatttcagccctgcagatgggaggtatgtttgtttccataatctgtgaatatactcctcagtacttactaaaatgtgtattgttaatgaactaatgaaaaatgttttggaccagctaggccacgaagcttagctttcacatagtatacttttctataatacaaatttataaaatgaaaagttcagagcacctatcaagagagcttatctggagccttgaaagaatcttctttaaagggtgttctctaactaattgctacctttaattagtgagcgtccaactatgacataattactcgcaactattctggtgtcttcagatgccaagcaagctccctgtggctgtaatgccttttgtgcatggtcctaaccatgattcctctcattcaaagccagcattcttggctttgcttcctttttcttagtttctgttatgaagctaatggtctgattcatgtgtattcctaatctgattgatgcaacagggtgcaagccaagggacaagcaagaagtttacgccgttcggcggtggcccccggctctgccctggatcagagcttgccaaagtagaggctgctttcttcctccatcaccttgtgctcaattataggtaaaacaaaagggcatatttgtcctacccgagtagaagatgcatggatcaaagttgactgacttaaaacagcaatgaacaagttcagaagtaataatctttaacaagctggtgcagagtagttggtgtttaaataggctaaaaaactgttgaggcaaacatgaacaggaaaacgtattgatgcagttacctctcatactgataatacacactacactagtaagtaatggcaagaaggatgacagcaactaggcaaattatttatgcttttgtctgcaaggaccgcatgtctgaactcagctatcttgtgcattttcataagtggcactgtagagcatagaatcagacgacaacacacagaacaaacatgacagcatggagttttcgataggtaggctatgcaagttgagttgagggctgccatacaagataaaatatactgcgatatgatcaaacttttctttttttaaaaaaaaaactaggttcattaacaataatctgtacgtgacaactgacaagaacaggcagagttatgtaacttacgtagttgtttcagagtacagtctacatgtacttactgaatatccatgccagagtgttggctgatcattgttcttcgtttcttgaaaaccttgtgccgtgcagatggagaatcgatggcgatgacattccgatggcatacccgtacgtggagttccagagaggtctgcccatagaaatcgagccactttgctctgagtcctgacaggtttgcggttgcagccacggtgagtgagttcatcaaccatccccgcaagcgagggggaggtgcacgcgataacaacggagaggattagtcagtgaagaaaaaaaaaagagaaaagattgcaaaaactgaagaaatgcactgggcactagctagtagtacctatcaatgagccagccgagattgtaatttgctgtacatggtgtagatatattttgtccatgccgattgcttgcggtggtggtggtggcttcaccctgtaacatcctccactgtttcaactttcatctgctattctatagaaaaagaaatttgggctattgggctattgaagattttggatgaagccaaaatcttcaaaaaacaaataattgaaactttgaaagagtactcctatccttaatacatgaacgttattcatatgaccatgaattaacctgtatggactgtattctgtacttgtcaaggaattttcgggaacagacaaattcgatcgtggataattcccatcgaaccgtggaatcgtagatggctggtcccgtttggattggaggaacaacggaggaattcctttccctgcaggggaaaaatcttagtttc

SEQ ID NO: 266 - DNA, 1095 bp, synthetic construct
  source 1..1095: mol_type = other DNA; note = Myb80 cDNA sequence - OPUNC04G13560.1
atggggcgtgtcccgtgctgcgagaaggacaacgtgaagcgcgggcagtggacgcccgaggaggacaacaagctgctctcctacatcacgcagtacggcacacgcaactggcgcctcatccccaagaacgccgggttgcagcggtgcgggaagagctgccggctgcggtggaccaactacctccgtcccgacctcaagcacggcgagttcaccgatgccgaggagcagaccatcatcaagctccactccgtcgtcggcaacaggtggtcggtgatcgcggcgcagctgccggggcggacggacaacgacgtgaagaaccactggaacacgaagctgaagaagaagctgtccgggatgggcatcgaccccgtcacgcacaagtccttctcgcacctcatggccgagatcgccaccacgctggcgccgccgcaggtcgcgcacctcgccgaggccgcgctggggtgcttcaaggacgagatgctccacctcctcacgaagaagcgcccctccgacttcccctcgcccgccgtgcacgacggagccggcgccaacgcgtccgcgctcgccgcgccctgcttccccaccgcgccgccgcaccacccgcaggccgatgacaccatcgagcgcatcaagctgggcctgtcccgcgccatcatgagcgatccctccaccgcctccgccgccgccgccgccccctccgctcccgcggaggacaagccgtggccgcccggcgacatctccgaggggctcgccgggatgtacgccacgtataacccggcggcgcacgcgcaggcgcaggccgagttccggtacgacggagccgccgcgccgggctacgtcctcggcggcgacggcgaccagggcacgtcgatgtggagccaccagagcctgtacagcgggagctccggaaccgaggaggccaggcgggcattgccggagaaaggcaacgacagcgtcggcagcagcggcggcgacgacgacgccgacgacggaaaggacagcgggaaggggggagcctccgacatgtcgggcctgttcgcctccgactgtgtgctctgggacttgcccgacgagctcacgaatcacatggtgtag

SEQ ID NO: 267 - DNA, 1095 bp, synthetic construct; identical to SEQ ID NO: 266
  source 1..1095: mol_type = other DNA; note = Myb80 coding sequence - OPUNC04G13560.1

SEQ ID NO: 268 - protein, 364 aa, synthetic construct
  source 1..364: note = Myb80 protein sequence - OPUNC04G13560.1
MGRVPCCEKDNVKRGQWTPEEDNKLLSYITQYGTRNWRLIPKNAGLQRCGKSCRLRWTNYLRPDLKHGEFTDAEEQTIIKLHSVVGNRWSVIAAQLPGRTDNDVKNHWNTKLKKKLSGMGIDPVTHKSFSHLMAEIATTLAPPQVAHLAEAALGCFKDEMLHLLTKKRPSDFPSPAVHDGAGANASALAAPCFPTAPPHHPQADDTIERIKLGLSRAIMSDPSTASAAAAAPSAPAEDKPWPPGDISEGLAGMYATYNPAAHAQAQAEFRYDGAAAPGYVLGGDGDQGTSMWSHQSLYSGSSGTEEARRALPEKGNDSVGSSGGDDDADDGKDSGKGGASDMSGLFASDCVLWDLPDELTNHMV

SEQ ID NO: 269 - DNA, 2492 bp, Oryza punctata
  source 1..2492: mol_type = genomic DNA; note = Myb80 genomic sequence - Oryza_punctata_v1.2:4:21205485:21207976:-1
tctttatttttctatcactaaccagggtagtaatacaaatatattttttaggagaataatacaaatagatttgaacaattgaatccttcgatctaataagatcaacgctttagattgtttttattagcggtagagcatagtggggcacttctgttagtgaatagtggtgttcatctagcaacattgtaagccaatactacagtagatctcatgtcgccgggagtggcgtagtgtagtgcagtgcagtgcagtatgcagggcgtcagtgagcgagatggcgaggcgagaacgcgagcggcgccgggagcgcgcggcttggaccgtggggttgacccggcgctgcgcgggtgggcaacctgtcccgccccccgggggtatgctcacgcgttgcgcgggcgttgaattctttatgccgcccatgccgccttcgccccgtgcgcgcccggtggtgcacacacccgccggcgcggcagcgcgcgcgtggggtcccggaggccgcgcctatttatacacgcggcgcaccgtgtgagtgccgcacgcacgcacgcacgcacgcagccagcagcagcagcggaatctcgacggcggggcggcgacatcatggggcgtgtcccgtgctgcgagaaggacaacgtgaagcgcgggcagtggacgcccgaggaggacaacaagctgctctcctacatcacgcagtacggcacacgcaactggcgcctcatccccaagaacgccggtacgttggcggcgcgcgccgcctgcgaatgcgcggttgagcacttgagcagcggtggccgtggcgtgggtggcgctgaccggggtgtttgttggctggaacgttggcagggttgcagcggtgcgggaagagctgccggctgcggtggaccaactacctccgtcccgacctcaagcacggcgagttcaccgatgccgaggagcagaccatcatcaagctccactccgtcgtcggcaacaggtaaaggcaacggatgatctctctacgccgtcttgtgatcttgtcatttttggcgaatgtattgagcaatgcgagctgtgtgcgcaggtggtcggtgatcgcggcgcagctgccggggcggacggacaacgacgtgaagaaccactggaacacgaagctgaagaagaagctgtccgggatgggcatcgaccccgtcacgcacaagtccttctcgcacctcatggccgagatcgccaccacgctggcgccgccgcaggtcgcgcacctcgccgaggccgcgctggggtgcttcaaggacgagatgctccacctcctcacgaagaagcgcccctccgacttcccctcgcccgccgtgcacgacggagccggcgccaacgcgtccgcgctcgccgcgccctgcttccccaccgcgccgccgcaccacccgcaggccgatgacaccatcgagcgcatcaagctgggcctgtcccgcgccatcatgagcgatccctccaccgcctccgccgccgccgccgccccctccgctcccgcggaggacaagccgtggccgcccggcgacatctccgaggggctcgccgggatgtacgccacgtataacccggcggcgcacgcgcaggcgcaggccgagttccggtacgacggagccgccgcgccgggctacgtcctcggcggcgacggcgaccagggcacgtcgatgtggagccaccagagcctgtacagcgggagctccggaaccgaggaggccaggcgggcattgccggagaaaggcaacgacagcgtcggcagcagcggcggcgacgacgacgccgacgacggaaaggacagcgggaaggggggagcctccgacatgtcgggcctgttcgcctccgactgtgtgctctgggacttgcccgacgagctcacgaatcacatggtgtaggcgtgtagctagctaaaacgcgggaaacttagcacgacgaagcacgccatgatcaacgaacaacatttgcagttgcagagtaatttgataatttaacatttttttgtgttgtttatttgtttcagtttacacttctgaggatgatacgtgggatcatcgaagtgaatgaaagtgaggtaggacatcaaataatcgaaacccctacaagtgttaaattatcaaatctctagtagttgcaggcggaaagaattggatcgtgtgaaaaattgctagcaataacattgctggaagagtgacagaaaaactagagttcgagagtacatgctgagagtaaaatgttttttttttgcctgggaaagagaaaaaaaagtgaaatgtgaatagttttaccgagatgcactgatgacgagtgatcgagtcggaggtcagggtatttttccagtcctttgctttattcacactccatgctcagtggaaaattcagtccagttcatagttcagaccagggtttacattatcacggggaccgcggttaccgtgccccgtgccccggtggtaagtacggttaccgcgcggtaactgtggtaaaccgtacgaaat

SEQ ID NO: 270 - DNA, 1437 bp, synthetic construct
  source 1..1437: mol_type = other DNA; note = Dwarf11 cDNA sequence - ORUFI04G16950.1
atggtgggaggagagcttgtgctggctgctctggtgatcctgcttgctttgctgctgaccctggtgctgagccacttcctgcctttgctcctgaatcccaaggctcccaagggaagctttgggtggcctctccttggtgagacgctgaggttcctcagtcctcatgctagcaacaccctgggcagcttcctggaggatcactgctccaggtatgggagggtgtttaagtcccatctgttctgcacccccaccatagtgtcctgtgaccaggagctgaaccacttcatccttcagaatgaggagaggctgtttcagtgcagctaccccaggccaattcatggcattctgggcaagtcctccatgttagtggtcctaggggaggaccacaagaggctcaggaaccttgctctagcactggtcacctccacaaagctcaagcccagctaccttggcgacattgagaagattgcactgcatatagttgggtcatggcatggcaagagcaaggacaaggggatggtcaatgtcatcgccttctgcgaggaggcaagaaagtttgcattcagtgtaatagtgaagcaggtgctggggctatcaccagaggagccggtcactgccatgatacttgaagatttcctcgccttcatgaagggtctcatctctttccctctctacatcccagggacgccctatgccaaagctgccagagcgaggatatcaagcactgtgaagggtattattgaggagaggaggaatgctggctccagcaacaagggtgatttccttgatgtgctgctttcaagcaatgagctctctgatgaggagaaagtgagctttgtgctggattccttactgggaggatatgagaccacctcactcttgatctccatggttgtgtatttccttgggcagtcagctcaagatctggaactagtgaagagggagcatgaaggcataagatcgaagaaagagaaggacgagttcttgagctctgaagactataagaagatggaatatacccaacatgttatcaatgaggcactgagatgtggcaacattgtcaagtttgtccacaggaaggctctcaaagatgtcagatacaaagagtatctgattccttctggttggaaggtcctacctgttttcagtgctgttcatttgaaccccttacttcatggaaatgcccaacaatttcagccctgcagatgggagggtgcaagccaagggacaagcaagaagtttacgccgttcggcggtggcccccggctctgccctggatcagagcttgcaaaagtagaggctgctttcttcctccatcaccttgtgctcaattatagatggagaatcgatggcgatgacattccgatggcatacccgtacgtggagttccagagaggtctgcccatagaaatcgagccactttgctctgaatcctga

SEQ ID NO: 271 - DNA, 1437 bp, synthetic construct; identical to SEQ ID NO: 270
  source 1..1437: mol_type = other DNA; note = Dwarf11 coding sequence - ORUFI04G16950.1

SEQ ID NO: 272 - protein, 478 aa, synthetic construct; identical to SEQ ID NO: 188
  source 1..478: note = Dwarf11 protein sequence - ORUFI04G16950.1

SEQ ID NO: 273 - DNA, 5045 bp, Oryza rufipogon
  source 1..5045: mol_type = genomic DNA; note = Dwarf11 genomic sequence - OR_W1943:4:19480753:19485797:-1
ccttgagcagcagcagcagcctagatgctagctactctgcattggaccatcctcctagtcctaggctgtaggctcatagccctccttgataaaagctacgactggcacagtatatgcatgcagccaattcacttcactgcagtaaaaaaaaaaaagaaaacagagagaaacagagatcaaacaatgcaagaaagaaatacccctacttctactttaaaacaaggccaaagcaaggaaacaaaaggcagcctctattttttttccctcccccccctgctcatcacccctttccatcactccctccctttgcaaagatccttcctgcctttgcttctactgctatatagcctcccccctcaccttccattccagagaaaaatagagggagggagagggagagaagcagagtgttgagcacaagctagtgaaagggttagatagaaacttggtagaatagacagataggcagagagagagagagagagcttagcaagctaaggcttagctgctgcaaggctccatccatgcttcttgttgtgagatgagattgagataagatgagcagggggtggtggtgcctggtgtgaggctataggtaagatggtgggaggagagcttgtgctggctgctctggtgatcctgcttgctttgctgctgaccctggtgctgagccacttcctgcctttgctcctgaatcccaaggctcccaagggaagctttgggtggcctctccttggtgagacgctgaggttcctcagtcctcatgctagcaacaccctgggcagcttcctggaggatcactgctccaggtaaattaaaatcatatgcagtaaacatttctatcagtatcaccaccacaaccacacaggagcaacaagtgtcatcttaccatgcaattaagtactgtaccattatttcatgtgacagcacaaggtaatgctgctgtcctgtcccagcagctttatcacgcccttttttttcctccctgatgaggggggtgctgtaacatgaattggacagtgtttagcatcttgttaaagagttgtgcaaaccttttcttccgatgaacaagcgagagaaaaggaatgtaaaggttgcacaacacttaactagctagcatgcatggtggtagtaacactgatgatggtgtgatgatgatgatgcaggtatgggagggtgtttaagtcccatctgttctgcacccccaccatagtgtcctgtgaccaggagctgaaccacttcatccttcagaatgaggagaggctgtttcagtgcagctaccccaggccaattcatggcattctgggcaagtcctccatgttagtggtcctaggggaggaccacaagaggctcaggaaccttgctctagcactggtcacctccacaaagctcaagcccagctaccttggcgacattgagaagattgcactgcatatagttgggtcatggcatggcaagagcaaggacaaggggatggtcaatgtcatcgccttctgcgaggaggcaagaaaggttagcaagtgtactaacttgaaaccagagccatatcaccacaaggacatgatcccttgaaacaagggagggaaaactttgcacatgttagctacataccatcatcatcatgttgttacttgctgctgcatgaatctttgtcccaaggtcactttgacttaccatggtcttttttaccttttctttttttttctctctctggtgtgctctctttccttgagaaccacagtttgcattcagtgtaatagtgaagcaggtgctggggctatcaccagaggagccggtcactgccatgatacttgaagatttcctcgccttcatgaagggtctcatctctttccctctctacatcccagggacgccctatgccaaagctgtgcaggcatgcaactcaacatctcatttacacaagtcgttaaactgtcaataaaattttcaggccattttatttttgtatacttaccataataacttcatccttttgtccgcgaatcctcacaggccagagcgaggatatcaagcactgtgaagggtattattgaggagaggaggaatgctggctccagcaacaagggtgatttccttgatgtgctgctttcaagcaatgagctctctgatgaggagaaagtgagctttgtgctggattccttactgggaggatatgagaccacctcactcttgatctccatggttgtgtatttccttgggcagtcagctcaagatctggaactagtgaaggtatacagacttctcatgctgaaaaagacagagcagtactggtaaataagtacttaattaagtggccatcaataaaatatatattaacatgtttgcatgcagagggagcatgaaggcataagatcgaagaaagagaaggacgagttcttgagctctgaagactataagaagatggaatatacccaacatgtaagatgatcgttcaatacatgctttaggattagttagtaagccaggggtacctttttttcctattatcagcaactacacaaatatgtgaccctccgaatatgaggtttactcatattcagaacgattctcctatgcctacccatatatgcaatttttgaattaagcaaaaaaaagaaaaagaaacagagagagaaagaatctcattacaatagagtgaaaagggcggaagggacatgttcttcaataatggaaactgtatgatgatgcatatgctatgcccttacaggttatcaatgaggcactgagatgtggcaacattgtcaagtttgtccacaggaaggctctcaaagatgtcagatacaaaggtaattaaccctacttgaggctttccttgaagattccattgtgctcatcacatgataatggatcaggcaaagtggatggttgcacctttattactgatttttaagcattgttattcctaaaatacctcagcttttcatagaagatgctcaaaagcaagtggctcttttttctttgctctgttgcagagtatctgattccttctggttggaaggtcctacctgttttcagtgctgttcatttgaaccccttacttcatggaaatgcccaacaatttcagccctgcagatgggaggtacgtttgtttccataatctgtgaatgctccgcaatacttactaaatgtttattgttagtgacctaatgaaaaatgttttggaccagctaggccacgaagcttagctttcacgtagtatacttttctataatacaaatttataaaatgaaaagttcagagcacctatcaagagagcttatctggagccttgaaagaatcttctttaaagggtgttctctaactaattgctacctttaattagtgagcgcccaactatgacataattactcgcaactattctggtgtcttcagatgccaaacaagctccctgtggctgcaatgccttttgtgcatggtcctaaccatgattcctctcattcaaagccagcattcttggctttgcttccttttcttagtttctgtgatgaagctaatggtctgattcatgtgtgttcctaatctgattgatgcaacagggtgcaagccaagggacaagcaagaagtttacgccgttcggcggtggcccccggctctgccctggatcagagcttgcaaaagtagaggctgctttcttcctccatcaccttgtgctcaattataggtaaaacaaaagggtatatttgtcctacccgagtagaagatgcatggatcaaagttgactggcttaaacagcaatgaacaaaatacgttcagaagtaatatttaagaagctggtgcagagtagttggtgtttaaataggccatagaaaactgttgaggcaaacatgaacaggaaaacatactgatgcagttaccactctcatactgataatacacactacactagaccactagtaagtaatggcaagaaggccatgacagcaactaggcaaattatttatgcttttgtctgtaaggaccgcaagtctgaactcagctatcttgtgcattttcataagtggcactgtagagcatagaatcagacgacaacacacagaacaaacatgacagcatggagttttcgataggtaggctatgcaagttgagttgagggctgccatacaagataaaatatactaccacgatatgatcaaactcttttttttaaaaaaaaaactaggttcattagcaacaatctatacgtgacaactgacaagaacaggcagatttatgtaaattatgcggttgtttcagagtagagtctacatgtacttactgaatatccatgccagagaaaggctgatcatcgttcttcgtttctttcgtttcttgaaaacctgtgcagatggagaatcgatggcgatgacattccgatggcatacccgtacgtggagttccagagaggtctgcccatagaaatcgagccactttgctctgaatcctgacaggtttgcagttgcagccacggtgagcgagttcatcaaatcatccccgcaagcgagggggagatgcgggcgagaacgacggactgagaggattagtcagtgaaacaaaaaaaaggagagaaaatatttcaagaactgaagaaatgcactgagcattagctagtagtacctatcaatgagccaagctgagattgtaatttgctgtacatggtgtagatatattttgtccatgccgattgcttgcggtggtggtggtgcggtgcttcaccctgtaacatcctccactgtttcaactttcatctgctattctatagaagaaaaaaaaaagaagaaaattgggctattgggctattgaaaagattttggatgaagccaaagatcttcaaaaacaaatcattgaaactttgaaagagtactcctatcctttaataatatgaacatgaacatgaacatgtatggactgtactctgcactacttctcagggaatttcggagcagacaaattcgatcgtggataatccctatcaatcggagatggctggtcccgtttggattggaggaatttctgaaggaatcctttcctgcaggggaaatcttagt

SEQ ID NO: 274 - DNA, 1122 bp, synthetic construct
  source 1..1122: mol_type = other DNA; note = Myb80 cDNA sequence - ORUFI04G17000.1
atggggcgggtgccgtgctgcgagaaggacaacgtgaagcgcgggcagtggacgcccgaggaggacaacaagctgctctcctacatcacccagtacggcacccgcaactggcgcctcatccccaagaacgccgggttgcagcggtgcgggaagagctgccggctgcggtggaccaactacctccggcccgacctcaagcacggcgagttcaccgacgccgaggagcagaccatcatcaagctccactccgtcgtcggcaacaggtggtcggtgatcgcggcgcagcttccggggcggacggacaacgacgtgaagaaccactggaacacgaagctgaagaagaagctgtccgggatgggcatcgaccccgtcacgcacaagtccttctcgcacctcatggccgagatcgccaccacgctggcgccgccgcaggtggcgcacctcgccgaggccgcgctggggtgcttcaaggacgagatgctccacctcctcaccaagaagcgcccctccgacttcccctcgcccgccgtgcacgacggcgccggcgccggcgccagcgcgtccgcgctcgccgcgccctgcttccccgccgcgccgccgcaccacccgcaggccgacgacaccatcgagcgcatcaagctcggcctgtcccgcgccatcatgagcgatccctccaccgcctccgccgccgccgccgccgccgccgcgccctccgcccccgcggaggacaagccgtggccgcccggcgacatgtccgaggggctcgccgggatgtacgccacgtacaacccggcggcgcacgcgcacgcgcaggcccaggccgagttccggtacgacggggcctccgcggcgcagggctacgtcctcggcggcgacggcgaccagggcacgtcgatgtggagccaccagagcctgtacagcgggagctccggcaccgaggaggccaggcgggcgttgccggagaagggcaacgacagcgtcggcagcagcggcggcgacgacgacgccgcggacgatggcaaggacagcgggaagggggcagcctccgacatgtcgggcctgttcgcctccgactgcgtgctctgggacttgcccgacgagctcacgaatcacatggtgtag

SEQ ID NO: 275 - DNA, 1122 bp, synthetic construct; identical to SEQ ID NO: 274
  source 1..1122: mol_type = other DNA; note = Myb80 coding sequence - ORUFI04G17000.1

SEQ ID NO: 276 - protein, 373 aa, synthetic construct
  source 1..373: note = Myb80 protein sequence - ORUFI04G17000.1
MGRVPCCEKDNVKRGQWTPEEDNKLLSYITQYGTRNWRLIPKNAGLQRCGKSCRLRWTNYLRPDLKHGEFTDAEEQTIIKLHSVVGNRWSVIAAQLPGRTDNDVKNHWNTKLKKKLSGMGIDPVTHKSFSHLMAEIATTLAPPQVAHLAEAALGCFKDEMLHLLTKKRPSDFPSPAVHDGAGAGASASALAAPCFPAAPPHHPQADDTIERIKLGLSRAIMSDPSTASAAAAAAAAPSAPAEDKPWPPGDMSEGLAGMYATYNPAAHAHAQAQAEFRYDGASAAQGYVLGGDGDQGTSMWSHQSLYSGSSGTEEARRALPEKGNDSVGSSGGDDDAADDGKDSGKGAASDMSGLFASDCVLWDLPDELTNHMV

SEQ ID NO: 277 - DNA, 2512 bp, Oryza rufipogon
  source 1..2512: mol_type = genomic DNA; note = Myb80 genomic sequence - OR_W1943:4:19522579:19525090:-1
atcatagtgctgcagcccatagaaatatgcattccccttgcttgtaaagatcctactaggataaaactgtgtgcagaaatgaatcgtttatctttgacagttttttttttctttttgagtctatcctcctgaacctaaggctgtaaatttgttcggacaaaggatcattactcatagcctgctatgttcacaaggttttatattactgaatagtggtgtttcatcaagcagcattagtgaatagttgcagtggcagtgtggtgcagggcgtcagtgagcgagatggcgaggcgagaacgcgagcggcgccgggagcgcgcggggcttggaccgtggccgtgaggggggttgacccggcgctgcgcgggtgggcaacctgtcccgcccccccggggggaggctcacgcgttgcgcgggcgttgaattctttatgccgcccatgccgccttcgccccccgtgcgcgcgcgcgcgcgcccactagccggcgcggcagcgcgcgcgggcggtcgcgaggccgcgagcctatttataacacgcggcgcggccgtgtgagcgccgcacgcacgcagcagcagcggaatctcgacggcggcgacatcatggggcgggtgccgtgctgcgagaaggacaacgtgaagcgcgggcagtggacgcccgaggaggacaacaagctgctctcctacatcacccagtacggcacccgcaactggcgcctcatccccaagaacgccggtacgttggcgcgcgcgccgccaccggcgaacgcgtggttgcagcagcggcggcgctctgaccggggtgtttgttgctggaacgttggcagggttgcagcggtgcgggaagagctgccggctgcggtggaccaactacctccggcccgacctcaagcacggcgagttcaccgacgccgaggagcagaccatcatcaagctccactccgtcgtcggcaacaggtaggcatcaacgagtggtctcgctacaccgtcttgtgatcttgggtcatttttggaggaatgtattgagcaatgcgggatggggctgtgtgtggcaaggtggtcggtgatcgcggcgcagcttccggggcggacggacaacgacgtgaagaaccactggaacacgaagctgaagaagaagctgtccgggatgggcatcgaccccgtcacgcacaagtccttctcgcacctcatggccgagatcgccaccacgctggcgccgccgcaggtggcgcacctcgccgaggccgcgctggggtgcttcaaggacgagatgctccacctcctcaccaagaagcgcccctccgacttcccctcgcccgccgtgcacgacggcgccggcgccggcgccagcgcgtccgcgctcgccgcgccctgcttccccgccgcgccgccgcaccacccgcaggccgacgacaccatcgagcgcatcaagctcggcctgtcccgcgccatcatgagcgatccctccaccgcctccgccgccgccgccgccgccgccgcgccctccgcccccgcggaggacaagccgtggccgcccggcgacatgtccgaggggctcgccgggatgtacgccacgtacaacccggcggcgcacgcgcacgcgcaggcccaggccgagttccggtacgacggggcctccgcggcgcagggctacgtcctcggcggcgacggcgaccagggcacgtcgatgtggagccaccagagcctgtacagcgggagctccggcaccgaggaggccaggcgggcgttgccggagaagggcaacgacagcgtcggcagcagcggcggcgacgacgacgccgcggacgatggcaaggacagcgggaagggggcagcctccgacatgtcgggcctgttcgcctccgactgcgtgctctgggacttgcccgacgagctcacgaatcacatggtgtagctaagctataaaacgcgggaaaacttagcacggcgaagcacgccatgatccacatcacttgcagttgcaggtggtgagaattggatacagcgaaaaattgctaccaataatattgctgaaagagtgacagaaaaagtgaaaaactatagtatgtagctggcaagaaaaatggggattctttttgcttggaaaagagaaaaaaaagtgagatgttaatagttttaccgagaagcactgattgattgagtgattgagccggaggccaaggtatttttccagtcctctgcttcagtcgcactccatgagcaatggataattcaattcagttcagacagattgtttacttcttccatggatcatattgtctgatgatgaggttgatgggaaaacgtcaatatgcaactctagcatgttatataaatgctcatgaaaattcagagaaaaaaaaatctataacaacgctgcacccaaaaagattgtgtgctgtctaaacttcagaaaatcatgtgaaatttctgaattttaaccatgagttgcacaactgtaccaaagaaggctagaacccagaaataaaacctgtggatctgacattttgataga

SEQ ID NO: 278 - DNA, 2024 bp, synthetic construct
  source 1..2024: mol_type = other DNA
agagaaaaatagagggagggagagggagagaagcagagtgttgagcacaagctagtgaaagggttagatagaaacttggtagaatagacagataggcagagagagagagagagcttagcaagctaaggcttagctgctgcaaggctccatccatgcttcttgttgtgagatgagattgagataagatgagcagggggtggtggtgcctggtgtgaggctataggtaagatggtgggaggagagcttgtgctggctgctctggtgatcctgcttgctttgctgctgaccctggtgctgagccacttcctgcctttgctcctgaatcccaaggctcccaagggaagctttgggtggcctctccttggtgagacgctgaggttcctcagtcctcatgctagcaacaccctgggcagcttcctggaggatcactgctccaggtatgggagggtgtttaagtcccatctgttctgcacccccaccatagtgtcctgtgaccaggagctgaaccacttcatccttcagaatgaggagaggctgtttcagtgcagctaccccaggccaattcatggcattctgggcaagtcctccatgttagtggtcctaggggaggaccacaagaggctcaggaaccttgctctagcactggtcacctccacaaagctcaagcccagctaccttggcgacattgagaagattgcactgcatatagttgggtcatggcatggcaagagcaaggacaaggggatggtcaatgtcatcgccttctgcgaggaggcaagaaagtttgcattcagtgtaatagtgaagcaggtgctggggctatcaccagaggagccggtcactgccatgatacttgaagatttcctcgccttcatgaagggtctcatctctttccctctctacatcccagggacgccctatgccaaagctgtgcaggccagagcgaggatatcaagcactgtgaagggtattattgaggagaggaggaatgctggctccagcaacaagggtgatttccttgatgtgctgctttcaagcaatgagctctctgatgaggagaaagtgagctttgtgctggattccttactgggaggatatgagaccacctcactcttgatctccatggttgtgtatttccttgggcagtcagctcaagatctggaactagtgaagagggagcatgaaggcataagatcgaagaaagagaaggacgagttcttgagctctgaagactataagaagatggaatatacccaacatgttatcaatgaggcactgagatgtggcaacattgtcaagtttgtccacaggaaggctctcaaagatgtcagatacaaagagtatctgattccttctggttggaaggtcctacctgttttcagtgctgttcatttgaaccccttacttcatggaaatgcccaacaatttcagccctgcagatgggagggtgcaagccaagggacaagcaagaagtttacgccgttcggcggtggcccccggctctgccctggatcagagcttgcaaaagtagaggctgctttcttcctccatcaccttgtgctcaattatagatggagaatcgatggcgatgacattccgatggcatacccgtacgtggagttccagagaggtctgcccatagaaatcgagccactttgctctgaatcctgacaggtttgcagttgcagccacggtgagcgagttcatcaaatcatccccgcaagcgagggggagatgcgggcgagaacgacggactgagaggattagtcagtgaaacaaaaaaaaggagagaaaatatttcaagaactgaagaatgcactgagcattagctagtagtacctatcaatgagccaagctgagattgtaatttgctgtacatggtgtagatatattttgtccatgccgattgcttgcggtggtggtggtgcggtgcttcaccctgtaacatcctccactgtttcaactttcatctgctattctatagaagaaaaaaaaaagaagaaaattgggctattgggctattg

SEQ ID NO: 279 - DNA, 1443 bp, synthetic construct; identical to SEQ ID NO: 214
  source 1..1443: mol_type = other DNA

SEQ ID NO: 280 - protein, 480 aa, synthetic construct; identical to SEQ ID NO: 200
  source 1..480: note = Dwarf11 protein sequence - Os04t0469800-01

SEQ ID NO: 281 - DNA, 2275 bp, synthetic construct
  source 1..2275: mol_type = other DNA; note = Dwarf11 cDNA sequence - Os04t0469800-02
gagaaaaatagagggagggagagggagagaagcagagtgttgagcacaagctagtgaaagggttagatagaaacttggtagaatagacagataggcagagagagagagagagcttagcaagctaaggcttagctgctgcaaggctccatccatgcttcttgttgtgagatgagattgagataagatgagcagggggtggtggtgcctggtgtgaggctataggtaagatggtgggaggagagcttgtgctggctgctctggtgatcctgcttgctttgctgctgaccctggtgctgagccacttcctgcctttgctcctgaatcccaaggctcccaagggaagctttgggtggcctctccttggtgagacgctgaggttcctcagtcctcatgctagcaacaccctgggcagcttcctggaggatcactgctccaggtatgggagggtgtttaagtcccatctgttctgcacccccaccatagtgtcctgtgaccaggagctgaaccacttcatccttcagaatgaggagaggctgtttcagtgcagctaccccaggccaattcatggcattctgggcaagtcctccatgttagtggtcctaggggaggaccacaagaggctcaggaaccttgctctagcactggtcacctccacaaagctcaagcccagctaccttggcgacattgagaagattgcactgcatatagttgggtcatggcatggcaagagcaaggacaaggggatggtcaatgtcatcgccttctgcgaggaggcaagaaagtttgcattcagtgtaatagtgaagcaggtgctggggctatcaccagaggagccggtcactgccatgatacttgaagatttcctcgccttcatgaagggtctcatctctttccctctctacatcccagggacgccctatgccaaagctgtgcaggccagagcgaggatatcaagcactgtgaagggtattattgaggagaggaggaatgctggctccagcaacaagggtgatttccttgatgtgctgctttcaagcaatgagctctctgatgaggagaaagtgagctttgtgctggattccttactgggaggatatgagaccacctcactcttgatctccatggttgtgtatttccttgggcagtcagctcaagatctggaactagtgaagagggagcatgaaggcataagatcgaagaaagagaaggacgagttcttgagctctgaagactataagaagatggaatatacccaacatgtaagatgatcgttcaatacatgctttaggattagttagtaagccaggggtacctttttttcctattatcagcaactacacaaatatgtgaccctccgaatatgaggtttactcatattcagaacgattctcctatgcctacccatatatgcaatttttgaattaagcaaaaaaaagaaaaagaaacagagagagaaagaatctcattacaatagagtgaaaagggcggaagggacatgttcttcaataatggaaactgtatgatgatgcatatgctatgcccttacaggttatcaatgaggcactgagatgtggcaacattgtcaagtttgtccacaggaaggctctcaaagatgtcagatacaaagagtatctgattccttctggttggaaggtcctacctgttttcagtgctgttcatttgaaccccttacttcatggaaatgcccaacaatttcagccctgcagatgggagggtgcaagccaagggacaagcaagaagtttacgccgttcggcggtggcccccggctctgccctggatcagagcttgcaaaagtagaggctgctttcttcctccatcaccttgtgctcaattatagatggagaatcgatggcgatgacattccgatggcatacccgtacgtggagttccagagaggtctgcccatagaaatcgagccactttgctctgaatcctgacaggtttgcagttgcagccacggtgagcgagttcatcaaatcatccccgcaagcgagggggagatgcgggcgagaacgacggactgagaggattagtcagtgaaacaaaaaaaaggagagaaaatatttcaagaactgaagaatgcactgagcattagctagtagtacctatcaatgagccaagctgagattgtaatttgctgtacatggtgtagatatattttgtccatgccgattgcttgcggtggtggtggtgcggtgcttcaccctgtaacatcctccactgtttcaactttcatctgctattctatagaag

SEQ ID NO: 282 - DNA, 1041 bp, synthetic construct
  source 1..1041: mol_type = other DNA; note = Dwarf11 coding sequence - Os04t0469800-02
atggtgggaggagagcttgtgctggctgctctggtgatcctgcttgctttgctgctgaccctggtgctgagccacttcctgcctttgctcctgaatcccaaggctcccaagggaagctttgggtggcctctccttggtgagacgctgaggttcctcagtcctcatgctagcaacaccctgggcagcttcctggaggatcactgctccaggtatgggagggtgtttaagtcccatctgttctgcacccccaccatagtgtcctgtgaccaggagctgaaccacttcatccttcagaatgaggagaggctgtttcagtgcagctaccccaggccaattcatggcattctgggcaagtcctccatgttagtggtcctaggggaggaccacaagaggctcaggaaccttgctctagcactggtcacctccacaaagctcaagcccagctaccttggcgacattgagaagattgcactgcatatagttgggtcatggcatggcaagagcaaggacaaggggatggtcaatgtcatcgccttctgcgaggaggcaagaaagtttgcattcagtgtaatagtgaagcaggtgctggggctatcaccagaggagccggtcactgccatgatacttgaagatttcctcgccttcatgaagggtctcatctctttccctctctacatcccagggacgccctatgccaaagctgtgcaggccagagcgaggatatcaagcactgtgaagggtattattgaggagaggaggaatgctggctccagcaacaagggtgatttccttgatgtgctgctttcaagcaatgagctctctgatgaggagaaagtgagctttgtgctggattccttactgggaggatatgagaccacctcactcttgatctccatggttgtgtatttccttgggcagtcagctcaagatctggaactagtgaagagggagcatgaaggcataagatcgaagaaagagaaggacgagttcttgagctctgaagactataagaagatggaatatacccaacatgtaagatga

SEQ ID NO: 283 - protein, 346 aa, synthetic construct
  source 1..346: note = Dwarf11 protein sequence - Os04t0469800-02
MVGGELVLAALVILLALLLTLVLSHFLPLLLNPKAPKGSFGWPLLGETLRFLSPHASNTLGSFLEDHCSRYGRVFKSHLFCTPTIVSCDQELNHFILQNEERLFQCSYPRPIHGILGKSSMLVVLGEDHKRLRNLALALVTSTKLKPSYLGDIEKIALHIVGSWHGKSKDKGMVNVIAFCEEARKFAFSVIVKQVLGLSPEEPVTAMILEDFLAFMKGLISFPLYIPGTPYAKAVQARARISSTVKGIIEERRNAGSSNKGDFLDVLLSSNELSDEEKVSFVLDSLLGGYETTSLLISMVVYFLGQSAQDLELVKREHEGIRSKKEKDEFLSSEDYKKMEYTQHVR

SEQ ID NO: 284 - DNA, 5626 bp, Oryza sativa
  source 1..5626: mol_type = genomic DNA; note = Dwarf11 genomic sequence - IRGSP-1.0:4:23466567:23472192:-1
aatttttgtcatgaaaaagaagggctttaggaaatgacacagatatgagtcatcgaagcaggggatccccaagaacagattgcaaaggcaaggtgtgtgcgcgcgcgcgcataagcttcatcagattcagagagagcttaattatcaccgatgtcccatgcatcgatctgcacctggctgtgcatgtactaccccaatgcatttctctctctacctgcgtgtttgactgcaccttgagcagcagcagcagcctagatgctagctactctgcattggaccatcctcctagtcctaggctgtaggctcatagccctccttgataaaagctactactggcacagtatatgcatgcagccaattcacttcactgcagtaaaaaaaaaaagaaaacagagagaaacagagatcaaacaatgcaagaaagaaatacccctacttctactttaaaacaaggccaaagcaaggaaacaaaaggcagcctctattttttttccctcccccccctgctcatcacccctttccatcactccctccctttgcaaagatccttcctgcctttgcttctactgctatatagcctcccccctcaccttccattccagagaaaaatagagggagggagagggagagaagcagagtgttgagcacaagctagtgaaagggttagatagaaacttggtagaatagacagataggcagagagagagagagagcttagcaagctaaggcttagctgctgcaaggctccatccatgcttcttgttgtgagatgagattgagataagatgagcagggggtggtggtgcctggtgtgaggctataggtaagatggtgggaggagagcttgtgctggctgctctggtgatcctgcttgctttgctgctgaccctggtgctgagccacttcctgcctttgctcctgaatcccaaggctcccaagggaagctttgggtggcctctccttggtgagacgctgaggttcctcagtcctcatgctagcaacaccctgggcagcttcctggaggatcactgctccaggtaaattaaaatcatatgcagtaaacatttctatcagtatcaccaccacaaccacacaggagcaacaagtgtcatcttaccatgcaattaagtactgtaccattatttcatgtgacagcacaaggtaatgctgctgtcctgtcccagcagctttatcacgcccttttttttcctccctgatgaggggggtgctgtaacatgaattggacagtgtttagcatcttgttaaagagttgtgcaaaccttttcttccgatgaacaagcgagagaaaaggaatgtaaaggttgcacaacacttaactagctagcatgcatggtggtagtaacactgatgatggtgtgatgatgatgatgcaggtatgggagggtgtttaagtcccatctgttctgcacccccaccatagtgtcctgtgaccaggagctgaaccacttcatccttcagaatgaggagaggctgtttcagtgcagctaccccaggccaattcatggcattctgggcaagtcctccatgttagtggtcctaggggaggaccacaagaggctcaggaaccttgctctagcactggtcacctccacaaagctcaagcccagctaccttggcgacattgagaagattgcactgcatatagttgggtcatggcatggcaagagcaaggacaaggggatggtcaatgtcatcgccttctgcgaggaggcaagaaaggttagcaagtgtactaacttgaaaccagagccatatcaccacaaggacatgatcccttgaaacaagggagggaaaactttgcacatgttagctacataccatcatcatcatgttgttacttgctgctgcatgaatctttgtcccaaggtcactttgacttaccatggtcttttttaccttttctttttttttctctctctggtgtgctctctttccttgagaaccacagtttgcattcagtgtaatagtgaagcaggtgctggggctatcaccagaggagccggtcactgccatgatacttgaagatttcctcgccttcatgaagggtctcatctctttccctctctacatcccagggacgccctatgccaaagctgtgcaggcatgcaactcaacatctcatttacacaagtcgttaaactgtcaataaaattttcaggccattttatttttgtatacttaccataataacttcatccttttgtccgcgaatcctcacaggccagagcgaggatatcaagcactgtgaagggtattattgaggagaggaggaatgctggctccagcaacaagggtgatttccttgatgtgctgctttcaagcaatgagctctctgatgaggagaaagtgagctttgtgctggattccttactgggaggatatgagaccacctcactcttgatctccatggttgtgtatttccttgggcagtcagctcaagatctggaactagtgaaggtatacagacttctcatgctgaaaaagacagagcagtactggtaaataagtacttaattaagtggccatcaataaaatatatattaacatgtttgcatgcagagggagcatgaaggcataagatcgaagaaagagaaggacgagttcttgagctctgaagactataagaagatggaatatacccaacatgtaagatgatcgttcaatacatgctttaggattagttagtaagccaggggtacctttttttcctattatcagcaactacacaaatatgtgaccctccgaatatgaggtttactcatattcagaacgattctcctatgcctacccatatatgcaatttttgaattaagcaaaaaaaagaaaaagaaacagagagagaaagaatctcattacaatagagtgaaaagggcggaagggacatgttcttcaataatggaaactgtatgatgatgcatatgctatgcccttacaggttatcaatgaggcactgagatgtggcaacattgtcaagtttgtccacaggaaggctctcaaagatgtcagatacaaaggtaattaaccctacttgaggctttccttgaagattccattgtgctcatcacatgataatggatcaggcaaagtggatggttgcacctttattactgatttttaagcattgttattcctaaaatacctcagcttttcatagaagatgctcaaaagcaagtggctcttttttctttgctctgttgcagagtatctgattccttctggttggaaggtcctacctgttttcagtgctgttcatttgaaccccttacttcatggaaatgcccaacaatttcagccctgcagatgggaggtacgtttgtttccataatctgtgaatgctccgcaatacttactaaatgtttattgttaatgacctaatgaaaaatgttttggaccagctaggccacgaagcttagctttcacgtagtatacttttctataatacaaatttataaaatgaaaagttcagagcacctatcaagagagcttatctggagccttgaaagaatcttctttaaagggtgttctctaactaattgctacctttaattagtgagcgcccaactatgacataattactcgcaactattctggtgtcttcagatgccaaacaagctccctgtggctgcaatgccttttgtgcatggtcctaaccatgattcctctcattcaaagccagcattcttggctttgcttccttttcttagtttctgtgatgaagctaatggtctgattcatgtgtgttcctaatctgattgatgcaacagggtgcaagccaagggacaagcaagaagtttacgccgttcggcggtggcccccggctctgccctggatcagagcttgcaaaagtagaggctgctttcttcctccatcaccttgtgctcaattataggtaaaacaaaagggtatatttgtcctacccgagtagaagatgcatggatcaaagttgactggcttaaacagcaatgaacaaaatacgttcagaagtaatatttaagaagctggtgcagagtagttggtgtttaaataggccatagaaaactgttgaggcaaacatgaacaggaaaacatactgatgcagttaccactctcatactgataatacacactacactagaccactagtaagtaatggcaagaaggccatgacagcaactaggcaaattatttatgcttttgtctgtaaggaccgcaagtctgaactcagctatcttgtgcattttcataagtggcactgtagagcatagaatcagacgacaacacacagaacaaacatgacagcatggagttttcgataggtaggctatgcaagttgagttgagggctgccatacaagataaaatatactaccacgatatgatcaaactcttttttttaaaaaaaaaactaggttcattagcaacaatctatacgtgacaactgacaagaacaggcagatttatgtaaattatgcggttgtttcagagtagagtctacatgtacttactgaatatccatgccagagaaaggctgatcatcgttcttcgtttctttcgtttcttgaaaacctgtgcagatggagaatcgatggcgatgacattccgatggcatacccgtacgtggagttccagagaggtctgcccatagaaatcgagccactttgctctgaatcctgacaggtttgcagttgcagccacggtgagcgagttcatcaaatcatccccgcaagcgagggggagatgcgggcgagaacgacggactgagaggattagtcagtgaaacaaaaaaaaggagagaaaatatttcaagaactgaagaatgcactgagcattagctagtagtacctatcaatgagccaagctgagattgtaatttgctgtacatggtgtagatatattttgtccatgccgattgcttgcggtggtggtggtgcggtgcttcaccctgtaacatcctccactgtttcaactttcatctgctattctatagaagaaaaaaaaaagaagaaaattgggctattgggctattgaaaagattttggatgaagccaaagatcttcaaaaacaaatcattgaaactttgaaagagtactcctatcctttaataatatgaacatgaacatgaacatgtatggactgtactctgcactacttctcagggaatttcggagcagacaaattcgatcgtggataatccctatcaatcggagatggctggtcccgtttggattggaggaatttctgaaggaatcctttcctgcaggggaaatcttagtttcagtgtttctggactgaaggaaaaaaccggacgaacagcagcattattccataagagtgggagttcccccccccccccccctcacatcgctagacgatttcacgggataacagtccccgaatccaccacgcgtaacctcgcccaggatcgaggccgaattccagccgaagccgcgccgcgccgtcgtccccgtatccaatccaccgcggcgtcgactctcccgccgttgcgcccggcccaacgccggcggcggtcccgcctctagcggcgcccgcaggatcatctgcacacccccgcgcgacaccgccgcccgccatgcccgccgctcgagctcaacgtgagaaggggaagg

SEQ ID NO: 285 - DNA, 1401 bp, synthetic construct
  source 1..1401: mol_type = other DNA; note = Myb80 cDNA sequence - Os04t0470600-00
atgccgcccatgccgccttcgccccccgtgcgcgcgcgcgcgcgcccactcgccggcgcggcagcgcgcgcgcgcgcgcgcgggcggtcgcgaggccgcgagcctatttataacacgcggcgcggccgtgtgagcgccgcacgcacgcagcagcagcggaatctcgacggcggcgacatcatggggcgggtgccgtgctgcgagaaggacaacgtgaagcgcgggcagtggacgcccgaggaggacaacaagctgctctcctacatcacccagtacggcacccgcaactggcgcctcatccccaagaacgccggtacgttggcgcgcgcgccgccaccggcgaacgcgtggttgcagcagcggcggcgctctgaccggggtgtttgttgctggaacgttggcagggttgcagcggtgcgggaagagctgccggctgcggtggaccaactacctccggcccgacctcaagcacggcgagttcaccgacgccgaggagcagaccatcatcaagctccactccgtcgtcggcaacaggtggtcggtgatcgcggcgcagcttccggggcggacggacaacgacgtgaagaaccactggaacacgaagctgaagaagaagctgtccgggatgggcatcgaccccgtcacgcacaagtccttctcgcacctcatggccgagatcgccaccacgctggcgccgccgcaggtggcgcacctcgccgaggccgcgctggggtgcttcaaggacgagatgctccacctcctcaccaagaagcgcccctccgacttcccctcgcccgccgtgcacgacggcgccggcgccggcgccagcgcgtccgcgctcgccgcgccctgtttccccgccgcgccgccgcaccacccgcaggccgacgacaccatcgagcgcatcaagctcggcctgtcccgcgccatcatgagcgatccctccaccgcctccgccgccgccgccgccgccgcgccctccgcccccgcggaggacaagccgtggccgcccggcgacatgtccgaggggctcgccgggatgtacgccacgtacaacccggcggcgcacgcgcacgcgcaggcccaggccgagttccggtacgacggggcctccgcggcgcagggctacgtcctcggcggcgacggcgaccagggcacgtcgatgtggagccaccagagcctgtacagcgggagctccggcaccgaggaggccaggcgggagttgccggagaagggcaacgacagcgtcggcagcagcggcggcgacgacgacgccgcggacgacggcaaggacagcgggaagggggcagcctccgacatgtcgggcctgttcgcctccgactgcgtgctctgggacttgcccgacgagctcacgaatcacatggtgtagctaagctataa

SEQ ID NO: 286 - DNA, 1401 bp, synthetic construct; identical to SEQ ID NO: 285
  source 1..1401: mol_type = other DNA; note = Myb80 coding sequence - Os04t0470600-00

SEQ ID NO: 287 - protein, 466 aa, synthetic construct
  source 1..466: note = Myb80 protein sequence - Os04t0470600-00
MPPMPPSPPVRARARPLAGAAARARARGRSRGREPIYNTRRGRVSAARTQQQRNLDGGDIMGRVPCCEKDNVKRGQWTPEEDNKLLSYITQYGTRNWRLIPKNAGTLARAPPPANAWLQQRRRSDRGVCCWNVGRVAAVREELPAAVDQLPPARPQARRVHRRRGADHHQAPLRRRQQVVGDRGAASGADGQRREEPLEHEAEEEAVRDGHRPRHAQVLLAPHGRDRHHAGAAAGGAPRRGRAGVLQGRDAPPPHQEAPLRLPLARRARRRRRRRQRVRARRALFPRRAAAPPAGRRHHRAHQARPVPRHHERSLHRLRRRRRRRALRPRGGQAVAARRHVRGARRDVRHVQPGGARARAGPGRVPVRRGLRGAGLRPRRRRRPGHVDVEPPEPVQRELRHRGGQAGVAGEGQRQRRQQRRRRRRRGRRQGQREGGSLRHVGPVRLRLRALGLARRAHESHGVAKL

SEQ ID NO: 288 - DNA, 1500 bp, Oryza sativa
  source 1..1500: mol_type = genomic DNA; note = Myb80 genomic sequence - IRGSP-1.0:4:23510635:23512134:-1
atgccgcccatgccgccttcgccccccgtgcgcgcgcgcgcgcgcccactcgccggcgcggcagcgcgcgcgcgcgcgcgcgggcggtcgcgaggccgcgagcctatttataacacgcggcgcggccgtgtgagcgccgcacgcacgcagcagcagcggaatctcgacggcggcgacatcatggggcgggtgccgtgctgcgagaaggacaacgtgaagcgcgggcagtggacgcccgaggaggacaacaagctgctctcctacatcacccagtacggcacccgcaactggcgcctcatccccaagaacgccggtacgttggcgcgcgcgccgccaccggcgaacgcgtggttgcagcagcggcggcgctctgaccggggtgtttgttgctggaacgttggcagggttgcagcggtgcgggaagagctgccggctgcggtggaccaactacctccggcccgacctcaagcacggcgagttcaccgacgccgaggagcagaccatcatcaagctccactccgtcgtcggcaacaggtaggcatcaacgagtggtctcgctacaccgtcttgtgatcttgggtcatttttggaggaatgtattgagcaatgcgggatggggctgtgtgtggcaaggtggtcggtgatcgcggcgcagcttccggggcggacggacaacgacgtgaagaaccactggaacacgaagctgaagaagaagctgtccgggatgggcatcgaccccgtcacgcacaagtccttctcgcacctcatggccgagatcgccaccacgctggcgccgccgcaggtggcgcacctcgccgaggccgcgctggggtgcttcaaggacgagatgctccacctcctcaccaagaagcgcccctccgacttcccctcgcccgccgtgcacgacggcgccggcgccggcgccagcgcgtccgcgctcgccgcgccctgtttccccgccgcgccgccgcaccacccgcaggccgacgacaccatcgagcgcatcaagctcggcctgtcccgcgccatcatgagcgatccctccaccgcctccgccgccgccgccgccgccgcgccctccgcccccgcggaggacaagccgtggccgcccggcgacatgtccgaggggctcgccgggatgtacgccacgtacaacccggcggcgcacgcgcacgcgcaggcccaggccgagttccggtacgacggggcctccgcggcgcagggctacgtcctcggcggcgacggcgaccagggcacgtcgatgtggagccaccagagcctgtacagcgggagctccggcaccgaggaggccaggcgggagttgccggagaagggcaacgacagcgtcggcagcagcggcggcgacgacgacgccgcggacgacggcaaggacagcgggaagggggcagcctccgacatgtcgggcctgttcgcctccgactgcgtgctctgggacttgcccgacgagctcacgaatcacatggtgtagctaagctataa

SEQ ID NO: 289 - DNA, 1594 bp, synthetic construct
  source 1..1594: mol_type = other DNA; note = Dwarf11 cDNA sequence - KQK97661
atgatggcgggggagctcgcgctggccgctctggcgatcctgctctcctcgctcctagccctggtgctgagccacttcctgcccttgctcctgaacccgaaggcccccaggggcagcttcggatggccgctgatcggtgagacgctcaggttcctcacgccccatgcttccaacacgctgggtggcttcctggaggatcactgcgccaggtatgggcgggtgttcaagtcccacctgttctgcacccccacggtggtgtcgtgcgaccaggacctcaaccacttcatcctgcagaacgaggagcggctgttccagtgcagctaccccaggccgatccatggcatcctgggcaagtcctccatgcttgtggtcctgggcgaggaccataagcgcctcaggaacctcgccctcgccctcgtcacctccaccaagctcaagcccagctacctcggcgacatcgagaagatcgcgctgcacgtcgtcggctcatggcgccaggcggccggtggcaaggagtgcggcggtggcggctgcgtcaaggtcatcaccttctgcgaggaggcaagaaagtttgcattcagtgtgatagtgaagcaggtgctggggttgtcgccagaggagccggtcactgccaggatactggaggacttcctggccttcatgaagggcctcatctccttccctctctacatcccagggaccccatatgccaaggctgtccaggccagagagaggatatccagcactgtgaagggcatcatcgaggagcggaggagtgcagggtcatgcaagaagggcgatttccttgacgtgctcctgtcgagcaatgagctctccgatgaggagaaagtgagctttgtgctggactccctgctgggaggatacgagaccacctcgctcctgatctccatggtcgtgtattttcttggacagtctgcggaagatctggacctggtcaagagggagcacgacagcataagatccaacaaagggaaggaggagtgcttgacttcagaagactacaagaagatggaatatacccaacatgttatcaatgaggctctgagatgcggcaacatcgtcaagttcgtccacaggaaggctctcaaagatgtcagatacaaagagtatctgattccatctggctggaaggtcctacccgtcttcagtgctgttcatctgaacccctcgcttcatggaaacgcacaacattttcagccctgcagatgggagggctcaagccaaggggcaagcaagaggtttacgccgttcggcggagggccccggctctgcccaggatcggagcttgccaaagtagaggctgctttcttcctccatcaccttgtgctcaattataggtaaaaacaaaagggaatatttgtcctatcagagtttgagatgcatacacaaatcagtggtacagtcacaacaacaaacctggcaaatcaaagcagcacatgaacatcgtagacatttcgataaccggcgtaacaaactaatgcggtgggacggatttttaagtttaagtagggacgagacaaaatgaacaggaaatcagaataatgtgcttatcgttgggatttaacctagaaag

SEQ ID NO: 290 - DNA, 1362 bp, synthetic construct
  source 1..1362: mol_type = other DNA; note = Dwarf11 coding sequence - KQK97661
atgatggcgggggagctcgcgctggccgctctggcgatcctgctctcctcgctcctagccctggtgctgagccacttcctgcccttgctcctgaacccgaaggcccccaggggcagcttcggatggccgctgatcggtgagacgctcaggttcctcacgccccatgcttccaacacgctgggtggcttcctggaggatcactgcgccaggtatgggcgggtgttcaagtcccacctgttctgcacccccacggtggtgtcgtgcgaccaggacctcaaccacttcatcctgcagaacgaggagcggctgttccagtgcagctaccccaggccgatccatggcatcctgggcaagtcctccatgcttgtggtcctgggcgaggaccataagcgcctcaggaacctcgccctcgccctcgtcacctccaccaagctcaagcccagctacctcggcgacatcgagaagatcgcgctgcacgtcgtcggctcatggcgccaggcggccggtggcaaggagtgcggcggtggcggctgcgtcaaggtcatcaccttctgcgaggaggcaagaaagtttgcattcagtgtgatagtgaagcaggtgctggggttgtcgccagaggagccggtcactgccaggatactggaggacttcctggccttcatgaagggcctcatctccttccctctctacatcccagggaccccatatgccaaggctgtccaggccagagagaggatatccagcactgtgaagggcatcatcgaggagcggaggagtgcagggtcatgcaagaagggcgatttccttgacgtgctcctgtcgagcaatgagctctccgatgaggagaaagtgagctttgtgctggactccctgctgggaggatacgagaccacctcgctcctgatctccatggtcgtgtattttcttggacagtctgcggaagatctggacctggtcaagagggagcacgacagcataagatccaacaaagggaaggaggagtgcttgacttcagaagactacaagaagatggaatatacccaacatgttatcaatgaggctctgagatgcggcaacatcgtcaagttcgtccacaggaaggctctcaaagatgtcagatacaaagagtatctgattccatctggctggaaggtcctacccgtcttcagtgctgttcatctgaacccctcgcttcatggaaacgcacaacattttcagccctgcagatgggagggctcaagccaaggggcaagcaagaggtttacgccgttcggcggagggccccggctctgcccaggatcggagcttgccaaagtagaggctgctttcttcctccatcaccttgtgctcaattataggtaa

SEQ ID NO: 291 - protein, 453 aa, synthetic construct
  source 1..453: note = Dwarf11 protein sequence - KQK97661
MMAGELALAALAILLSSLLALVLSHFLPLLLNPKAPRGSFGWPLIGETLRFLTPHASNTLGGFLEDHCARYGRVFKSHLFCTPTVVSCDQDLNHFILQNEERLFQCSYPRPIHGILGKSSMLVVLGEDHKRLRNLALALVTSTKLKPSYLGDIEKIALHVVGSWRQAAGGKECGGGGCVKVITFCEEARKFAFSVIVKQVLGLSPEEPVTARILEDFLAFMKGLISFPLYIPGTPYAKAVQARERISSTVKGIIEERRSAGSCKKGDFLDVLLSSNELSDEEKVSFVLDSLLGGYETTSLLISMVVYFLGQSAEDLDLVKREHDSIRSNKGKEECLTSEDYKKMEYTQHVINEALRCGNIVKFVHRKALKDVRYKEYLIPSGWKVLPVFSAVHLNPSLHGNAQHFQPCRWEGSSQGASKRFTPFGGGPRLCPGSELAKVEAAFFLHHLVLNYR

SEQ ID NO: 292 - DNA, 4666 bp, Setaria italica
  source 1..4666: mol_type = genomic DNA; note = Dwarf11 genomic sequence - Setaria_italica_v2.0:VII:22472930:22477595:-1
gccctggccgtttgcacaactctctctctctctctccctctctacctgcgtgtttgactgcacctttgcagcctagatgctaggctaccctacgctggaccatcctcctagtcctagctatagcccctcccttgataaaagctacacttatgttactgttctgtactgcatcactgaggtaatttggctgcagtaaaaacagagatcatactgccagtaccttttgttttagggaaaagaacagagatcatgctacttcaatgcatggaagaacactaaataaacaaacgaaaagaaggcggccaaagaaaggaaacaaaaggcagccttattttttttccctcccctctccctttgccaagatccttcctgcctcgcttctgctactatatagctcccccctcgcctcgcattccagagagagaagggaacagcagcccaggggtgagctgtgcctgcgtgagcgtttgagcaagctaggcgaagcattcgtacttacagatatacatatacatatatacatatatagatatataaagatagacagagtgattcttgctggctccatgcttgtgagatgagacttgcgagtggtggtcgatgatggcgggggagctcgcgctggccgctctggcgatcctgctctcctcgctcctagccctggtgctgagccacttcctgcccttgctcctgaacccgaaggcccccaggggcagcttcggatggccgctgatcggtgagacgctcaggttcctcacgccccatgcttccaacacgctgggtggcttcctggaggatcactgcgccaggtaaatactccagcgtttcatttcctttgcttttaccaccaccatccgtgcacagcaaaccacagatcctcttaactatatattaccgcgacatcgcaattaaggggctgtttggatacgaggtgctaaactttaacagtgtcacatcggatgtttggatgctaattaggaggactaaacatgagctaattataaaactaattgcagaaccttgtgctaattcgcgagacgaatctattaagcctaattaatccatgatttgacaatgtggtgctgtagcaccacattgtcaaatcatggattaattaggcttaatagattcgtctcgcgaattagcacaaggttttgcaattagttttataattagctcatgtttagtcctcctaattagcatccgaacatccgatgtgacactgttaaagtttagcacctcgtatccaaacagccccttaaaaaggttaaacgatgattaacatggccgcggtaacagtaacaccaatgttgttgttgtgggtatgatgctgctgcaggtatgggcgggtgttcaagtcccacctgttctgcacccccacggtggtgtcgtgcgaccaggacctcaaccacttcatcctgcagaacgaggagcggctgttccagtgcagctaccccaggccgatccatggcatcctgggcaagtcctccatgcttgtggtcctgggcgaggaccataagcgcctcaggaacctcgccctcgccctcgtcacctccaccaagctcaagcccagctacctcggcgacatcgagaagatcgcgctgcacgtcgtcggctcatggcgccaggcggccggtggcaaggagtgcggcggtggcggctgcgtcaaggtcatcaccttctgcgaggaggcaagaaaggttagcaactgtactcttgctgttaatcccttggagacacatggagagagaagctctgcacatgtcaccgacgtgcatacatcgtcctgcttgttgttactcttgctgttgctgctgcatgaatctttttccgtggccactttgacttacacagggtcttttttctttttcctctgcggtggcgtgttctctgtcctttgagaagcacagtttgcattcagtgtgatagtgaagcaggtgctggggttgtcgccagaggagccggtcactgccaggatactggaggacttcctggccttcatgaagggcctcatctccttccctctctacatcccagggaccccatatgccaaggctgtccaggtaaaccatccagacatgcctttattagcacacactatgcttacaataaataaaaaaacataccatgcttacactaataaaagatgcgttatgatcatacagtatataacagtggttttttctgttgtctgctgctccgatcctaataactcacacaggccagagagaggatatccagcactgtgaagggcatcatcgaggagcggaggagtgcagggtcatgcaagaagggcgatttccttgacgtgctcctgtcgagcaatgagctctccgatgaggagaaagtgagctttgtgctggactccctgctgggaggatacgagaccacctcgctcctgatctccatggtcgtgtattttcttggacagtctgcggaagatctggacctggtcaaggtaatacatgcatgattttcactgtgaagacacagatgatttgctagtagctaggccggtggccatcagtaaactatatgcatgtgaatatgctatgcacgcagagggagcacgacagcataagatccaacaaagggaaggaggagtgcttgacttcagaagactacaagaagatggaatatacccaacatgtaagatgaccattcactacctactgtacaggatttgttagtaagcaagggaccttttttttccctcctgtcagcagcaagccatacaaatgacatttttgtggatattcagactagttgtgtgtttgtgatgcatatgtgcatgctcttgcaggttatcaatgaggctctgagatgcggcaacatcgtcaagttcgtccacaggaaggctctcaaagatgtcagatacaaaggtaaattaacaaccctgcatcagcaccgtattgaggctttcgttgcagattccatttgtgctcatcacatgataatggatcggaggcagaggggatggtcgcacctttaagcctgatttttaagcattgttatgcctagaaacacctagcttttgatagacgaagatgctcaaaagcaagtggctctcgcttttgctctgttgcagagtatctgattccatctggctggaaggtcctacccgtcttcagtgctgttcatctgaacccctcgcttcatggaaacgcacaacattttcagccctgcagatgggaggtatgctcttttctgttcatgagtagtactttaccacctgccatgtatattggtaatgaactaatgagctgatgattcgcacaatcatatttcattcctgtcaggccataattaacagcttaactttgtgataataagctacttattcaaacctgaaatatataattaaaaggctagagcacctatcaaagaagcttatctggggcttttagggaatcttctttaaagtgtgtactcttaactaattgctgcctttaattagtgagtgtccacctgtgacataattacctgcaactatcctggtgtcttcagatgccaagcaagctgcctgaggctgtagtgcctgttgtcaatggtcctggccatgattcctctcattcaaagccagcatccttggctttgcttcactatttttcttttggtttctttgatttttttttgaatgaattctttgatgatcttcatggcttgattcatatgcacgcacgacttatctgactgctgtaccagggctcaagccaaggggcaagcaagaggtttacgccgttcggcggagggccccggctctgcccaggatcggagcttgccaaagtagaggctgctttcttcctccatcaccttgtgctcaattataggtaaaaacaaaagggaatatttgtcctatcagagtttgagatgcatacacaaatcagtggtacagtcacaacaacaaacctggcaaatcaaagcagcacatgaacatcgtagacatttcgataaccggcgtaacaaactaatgcggtgggacggatttttaagtttaagtagggacgagacaaaatgaacaggaaatcagaataatgtgcttatcgttgggatttaacctagaaagtatagtaacacatactagtacatgaacaaggacgcaaaacaatgaggttagcggtgtcatactagtaacagaaactgttgaaagtaatagcaagagggttgtgatgtaccatcgacagggaccgcaagtcttaaattaagtattatgtagttgtggatccagaactgtagaacatattatcaggcatgtctgcatggagttttctacaagtaggatatgcaagttgagttgtactgctaaccaaccagagaaacaacattatcgtgtgatcaaactgccaaatctggttcataataatctgcgaccatctgaatatgacaaaggacctggtattgttttccgggagtaatagaactacctacggttaccgaagaaccgctagctgatcatccttcccctctcttgaattaaaacttggcgccttgcagatggagaatcgatggcgatgacgttccgatggcatacccgtacgtggagttccagaggggtctgccaatagaaatcgagccaatctgccctgaatcttgactggcctgaaggtgagttcgtcagttacaaggcgcctgcacgggggccatccatgtccatgaatagtcagtc

SEQ ID NO: 293 - DNA, 1107 bp, synthetic construct
  source 1..1107: mol_type = other DNA; note = Myb80 cDNA sequence - KQK97666
atggggcgcgtcccgtgctgcgagaaggacaacgtgaagcgcggacagtggacgccggaggaggacaacaagctgctctcctacatcacgcagtacggcacgcgcaactggcgcctcatccccaaaaacgccgggctgcagcggtgcggcaagagctgccgcctccggtggaccaactacctccggcccgacctcaagcacggcgagttcacggacgccgaggagcagaccatcatcaagctgcactccgtcgtcggcaaccggtggtcggtcatcgccgcgcagctccccgggcggaccgacaacgacgtcaagaaccactggaacaccaagctcaagaagaagctgtccgggatgggcatcgaccccgtcacgcacaagtccttctcccacctcatggccgagatcgcgaccacgctggccccgccgcaggtcgcgcacctcgccgaggccgcgctgggctgcttcaaggacgagatgctccacctcctcaccaagaagcgccccaccgacttcccctcgcccgccgtgccgcccaacatctccatggacggcgctgccgccgcggggatcggcgcgccctgcggcttccccgccgcgccgccgcagcaggccgacgacaccatcgagcgcatcaagctgggcctgtcccgcgccatcatgagcgagcccggcgccggcgcttgcgcgcccactgacaagcagcagcagcagccctgggcaccggccgacatgcccgaggggctggcggggatgtacgccgcgttcaaccccgccgcgcacgggcaggacgagttccggtacgacaccggggcggtgccggactacgtcctcggcggcagcggcggcgaggcggaccagggcacgtcgatgtggagccaccagagcttgtacagcgggagctcgggcaccgatgcggcggccaggccggcgacggcattgccggagaaaggcaacgacagcgtcggcagtagcggcggcggcgacgaggaggcggacaacgtcaaggacggcgggaagggcgacggctccgacatgtccggcctgttcggatccgactgtgtactctgggacttgcctgatgagctgaccaatcacatggtgtaa

SEQ ID NO: 294 - DNA, 1107 bp, synthetic construct; identical to SEQ ID NO: 293
  source 1..1107: mol_type = other DNA; note = Myb80 coding sequence - KQK97666

SEQ ID NO: 295 - protein, 368 aa, synthetic construct
  source 1..368: note = Myb80 protein sequence - KQK97666
MGRVPCCEKDNVKRGQWTPEEDNKLLSYITQYGTRNWRLIPKNAGLQRCGKSCRLRWTNYLRPDLKHGEFTDAEEQTIIKLHSVVGNRWSVIAAQLPGRTDNDVKNHWNTKLKKKLSGMGIDPVTHKSFSHLMAEIATTLAPPQVAHLAEAALGCFKDEMLHLLTKKRPTDFPSPAVPPNISMDGAAAAGIGAPCGFPAAPPQQADDTIERIKLGLSRAIMSEPGAGACAPTDKQQQQPWAPADMPEGLAGMYAAFNPAAHGQDEFRYDTGAVPDYVLGGSGGEADQGTSMWSHQSLYSGSSGTDAAARPATALPEKGNDSVGSSGGGDEEADNVKDGGKGDGSDMSGLFGSDCVLWDLPDELTNHMV

SEQ ID NO: 296 - DNA, 2307 bp, Setaria italica
  source 1..2307: mol_type = genomic DNA; note = Myb80 genomic sequence - Setaria_italica_v2.0:VII:22506182:22508488:-1
gaccctagaacaccagcacgaaagccattgccaatttgaccgctgccttgactgacggaggtgaaagagctgatgatccttgcacgcacgccctcggcacggtgctttgttctcccaggaagtacgttgccaatgccaccccatccgcggcgtcgattagcgccgggagccgaccgatcagacgacgccgaggagaacaggagaagaagggaacgcgccgggcgccgggcgacgagggctctgctgcttggaccgggggttgacccggcgctgtacgggtgggcaacctgtccctgctcccgggggcgccgtcacgcgttgcgcgggcgttgaattctttatgccgctcatgcctccttcgcccgtgcgcgccgcgcccgcccttcccgtgcgcgggcgcacgccgccggcagcacgcgcgggtgcggccgcggcgcgcgcgcctatttatgcgcccggcgcccgaggtgagcgccacacacttgaacactcaccatcgtcagaaccagcatcgcagcagggtcgtgcaacgcgggctcgaagtatcatcggcgtcgtcaggggggtgcactaccggaagcggcggcggcggcggcggagatggggcgcgtcccgtgctgcgagaaggacaacgtgaagcgcggacagtggacgccggaggaggacaacaagctgctctcctacatcacgcagtacggcacgcgcaactggcgcctcatccccaaaaacgccgggctgcagcggtgcggcaagagctgccgcctccggtggaccaactacctccggcccgacctcaagcacggcgagttcacggacgccgaggagcagaccatcatcaagctgcactccgtcgtcggcaaccggtggtcggtcatcgccgcgcagctccccgggcggaccgacaacgacgtcaagaaccactggaacaccaagctcaagaagaagctgtccgggatgggcatcgaccccgtcacgcacaagtccttctcccacctcatggccgagatcgcgaccacgctggccccgccgcaggtcgcgcacctcgccgaggccgcgctgggctgcttcaaggacgagatgctccacctcctcaccaagaagcgccccaccgacttcccctcgcccgccgtgccgcccaacatctccatggacggcgctgccgccgcggggatcggcgcgccctgcggcttccccgccgcgccgccgcagcaggccgacgacaccatcgagcgcatcaagctgggcctgtcccgcgccatcatgagcgagcccggcgccggcgcttgcgcgcccactgacaagcagcagcagcagccctgggcaccggccgacatgcccgaggggctggcggggatgtacgccgcgttcaaccccgccgcgcacgggcaggacgagttccggtacgacaccggggcggtgccggactacgtcctcggcggcagcggcggcgaggcggaccagggcacgtcgatgtggagccaccagagcttgtacagcgggagctcgggcaccgatgcggcggccaggccggcgacggcattgccggagaaaggcaacgacagcgtcggcagtagcggcggcggcgacgaggaggcggacaacgtcaaggacggcgggaagggcgacggctccgacatgtccggcctgttcggatccgactgtgtactctgggacttgcctgatgagctgaccaatcacatggtgtaactaatatcaagatcaaagaacagcattttcaggattaaactgaaatgaagaagtaaccgagcaaaatatgctgaaaaaaagagagggagttataaacttagaataaggagtatgaaaatcatgtatattttgccacgtgaaaaaggagaatgtgcatatatagaacagaggagttttatttggagtcctctgttgcagggggtaattgacagttccaattcaaacaaattgtttagttcgtttcaactgtggttgtctggttattttacaaagttcattcccaagtttttcgattttcttctgcacaaaaaagtttttctattttctcatttttaattttttatttatgtgaattcattttattagtatttgctcaactatgcagagagcccagcccaagagcatccgaaaattctacgattgggcctacttttccaatccctctctctctgatcagatggccatctcgtgcccgttgtggggtcgatagcatccgacggctacagagagcccaacccaggtttcaccttcctcctcttggagatcttctggcgagtttccgtttcaccgtttcaggtcccatggcggcggcggcggcgc

SEQ ID NO: 297 - DNA, 2129 bp, synthetic construct
  source 1..2129: mol_type = other DNA; note = Dwarf11 cDNA sequence - EES10969
ttaatcggacgcttatcctcttatagtgtccccctccatctctctttccttcccctcctctccatttgccaagatccttcctgccttctgctactatatagctcccccctcaccttccattctagagagaggggaaggtgccagcggcctgtttgtgtgagcattgttgagcaaagctaagctaagagaagcaagcaaagcattcatacttacatatatatacatatatgtatatatatactgtagatagatagatcgatatatagagagacaggcgaggagagattcttgcagcaggctcgatccgatgatccatgcatgcgcttgtgagatgagatgagatatcgatgaaactagaactagggaggaggagtggtggtgggcgaggatgatggctggggagctcgtgctggccgctgtggcgaccctgctcgcgtcgtcgctcctggctctggtgctcagccacttcctgcctttgcttctgaatcccaaggcccccaagggaagcttcgggtggccgctcctcggcgagacgctgcggttcctcacgccgcacgcgtccaacacgctgggcggcttcctggaggatcactgctccaggtatgggcaggtgttcaagtcccacctgttctgcacccccacggtggtgtcctgcgaccaggacctcaaccacttcatcctgcagaacgaggagcggctgttccagtgcagctaccccaggccgatccatggcatcctgggcaagtcctccatgctcgtggtcctgggcgaggaccacaagcgcctcaggaacctcgccctcgccctcgtcacctccaccaagctcaagcccagctacctcggcgacatcgagaagatcgcgctgcacgtcgtcggcgcatggcgacgacacgacggcggcggcggcggcggcggcggcggcggcgtcagagtcatcgccttctgcgaggaggcaagaaagttcgcattcagtgtgatagtgaagcaggtgctggggctgtcaccagaggagccggtcactgcaaggatactggaggacttcctggccttcatgaagggcctcatctccttccctctctacatcccagggaccccatatgccaaggctgtccaggcgagggagaggatatccaacactgtgaagggcatcatcgaggagcggaggagtgctgggtcatgcaacaagggtgacttccttgacgtgctgctgtcaagcaacgagctctctgacgaggagaaagtgagcttcgtgctggactccctgctgggaggatatgagaccacctcgctcctcatctccatggtcgtttacttccttgggcagtctgctcaagatctggacctggttaagagggagcacgacagcataagatccaacaaagggaaggaggagtgcttgacttcagaagactacaagaagatggaatatacccaacaagttatcaacgaggcgctgagatgtggcaacattgtcaagtttgtccaccggaaggcgctcaaagatgtcaaatacaaagagtatctgattccatctggctggaaggtcctaccggtcttcagcgctgttcatctgaacccctcacttcatggaaacgcacaacagtttcagccctgtagatgggaggggacaagccaagggacaagcaagaggtttacaccgttcggtggtggcccccggctctgcccaggatcagagcttgctaaagtagaggctgctttcttcctccatcaccttgtcctcaattatagatggagaattgatggcgatgacattccgatggcatacccatatgtggagtttcagagaggtctgccaatagaaatcgagccaacttcacctgaatctggactgtcctgaagcttgagccgcagcgcgttcatcagttagtagtacgccagagagaaaggggaagaaggtgcatggagcatatacatgaaggatcagtgacaaatcccataaattaaggaaacactgagcacgggctagtagctagcatgaggcagctgagactgtaatttgatgtacatggtgtagatatattttgtccatggcaattgcttgaggtggttgattcacttcaccctgtaaaacattctccagtggttcaagtactatcctataaaaaaga

SEQ ID NO: 298 - DNA, 1470 bp, synthetic construct
  source 1..1470: mol_type = other DNA; note = Dwarf11 coding sequence - EES10969
atgatggctggggagctcgtgctggccgctgtggcgaccctgctcgcgtcgtcgctcctggctctggtgctcagccacttcctgcctttgcttctgaatcccaaggcccccaagggaagcttcgggtggccgctcctcggcgagacgctgcggttcctcacgccgcacgcgtccaacacgctgggcggcttcctggaggatcactgctccaggtatgggcaggtgttcaagtcccacctgttctgcacccccacggtggtgtcctgcgaccaggacctcaaccacttcatcctgcagaacgaggagcggctgttccagtgcagctaccccaggccgatccatggcatcctgggcaagtcctccatgctcgtggtcctgggcgaggaccacaagcgcctcaggaacctcgccctcgccctcgtcacctccaccaagctcaagcccagctacctcggcgacatcgagaagatcgcgctgcacgtcgtcggcgcatggcgacgacacgacggcggcggcggcggcggcggcggcggcggcgtcagagtcatcgccttctgcgaggaggcaagaaagttcgcattcagtgtgatagtgaagcaggtgctggggctgtcaccagaggagccggtcactgcaaggatactggaggacttcctggccttcatgaagggcctcatctccttccctctctacatcccagggaccccatatgccaaggctgtccaggcgagggagaggatatccaacactgtgaagggcatcatcgaggagcggaggagtgctgggtcatgcaacaagggtgacttccttgacgtgctgctgtcaagcaacgagctctctgacgaggagaaagtgagcttcgtgctggactccctgctgggaggatatgagaccacctcgctcctcatctccatggtcgtttacttccttgggcagtctgctcaagatctggacctggttaagagggagcacgacagcataagatccaacaaagggaaggaggagtgcttgacttcagaagactacaagaagatggaatatacccaacaagttatcaacgaggcgctgagatgtggcaacattgtcaagtttgtccaccggaaggcgctcaaagatgtcaaatacaaagagtatctgattccatctggctggaaggtcctaccggtcttcagcgctgttcatctgaacccctcacttcatggaaacgcacaacagtttcagccctgtagatgggaggggacaagccaagggacaagcaagaggtttacaccgttcggtggtggcccccggctctgcccaggatcagagcttgctaaagtagaggctgctttcttcctccatcaccttgtcctcaattatagatggagaattgatggcgatgacattccgatggcatacccatatgtggagtttcagagaggtctgccaatagaaatcgagccaacttcacctgaatctggactgtcctga

SEQ ID NO: 299 - protein, 489 aa, synthetic construct
  source 1..489: note = Dwarf11 protein sequence - EES10969
MMAGELVLAAVATLLASSLLALVLSHFLPLLLNPKAPKGSFGWPLLGETLRFLTPHASNTLGGFLEDHCSRYGQVFKSHLFCTPTVVSCDQDLNHFILQNEERLFQCSYPRPIHGILGKSSMLVVLGEDHKRLRNLALALVTSTKLKPSYLGDIEKIALHVVGAWRRHDGGGGGGGGGGVRVIAFCEEARKFAFSVIVKQVLGLSPEEPVTARILEDFLAFMKGLISFPLYIPGTPYAKAVQARERISNTVKGIIEERRSAGSCNKGDFLDVLLSSNELSDEEKVSFVLDSLLGGYETTSLLISMVVYFLGQSAQDLDLVKREHDSIRSNKGKEECLTSEDYKKMEYTQQVINEALRCGNIVKFVHRKALKDVKYKEYLIPSGWKVLPVFSAVHLNPSLHGNAQQFQPCRWEGTSQGTSKRFTPFGGGPRLCPGSELAKVEAAFFLHHLVLNYRWRIDGDDIPMAYPYVEFQRGLPIEIEPTSPESGLS

SEQ ID NO: 300 - DNA, 5837 bp, Sorghum bicolor
  source 1..5837: mol_type = genomic DNA; note = Dwarf11 genomic sequence - Sorghum_bicolor_NCBIv3:6:48244995:48250831:1
ttaatgtaacatctattcgtatgtttttaatcattggacaaacatagtaaacacacacattttcgtgaaaagaacatcatttttttaataattggacaaacttaggccctgtttagattggagatggaaaaattttgggtgtcacatcaaatatttcggaaggatgtcgggataaaaatttttgggataaattattttattttttttatctacatttaatgttctgtacatgtgtctaaagattcgatgtgatggataaaaatttttaggcgaggaattaaatagggccttagaccaactagttgagaataaacaagagagagaaagtcaagccggacagtatacacagggattagcagggggtgtcagagagagtgatgcaccggccggggtctgtgcgagctgagcaactgagtccgtcgctagctactcaactttttatgttctctatccagccatgtagacaagatcgcttcagctggatgtagtcggcataaatatttcattgtccatggacacacatgcatcatccgctggatgtagtccatttacacattgtttaaatttgaacactactacataagaactagttgtgtttgtttaatcggacgcttatcctcttatagtgtccccctccatctctctttccttcccctcctctccatttgccaagatccttcctgccttctgctactatatagctcccccctcaccttccattctagagagaggggaaggtgccagcggcctgtttgtgtgagcattgttgagcaaagctaagctaagagaagcaagcaaagcattcatacttacatatatatacatatatgtatatatatactgtagatagatagatcgatatatagagagacaggcgaggagagattcttgcagcaggctcgatccgatgatccatgcatgcgcttgtgagatgagatgagatatcgatgaaactagaactagggaggaggagtggtggtgggcgaggatgatggctggggagctcgtgctggccgctgtggcgaccctgctcgcgtcgtcgctcctggctctggtgctcagccacttcctgcctttgcttctgaatcccaaggcccccaagggaagcttcgggtggccgctcctcggcgagacgctgcggttcctcacgccgcacgcgtccaacacgctgggcggcttcctggaggatcactgctccaggtaataataacgtactactgctgtaattgtaaatagctagctactagtcgtccagtgttccagtgtcgtcgtttaattaccatccaccatgcacacagcaggcacagaactgtctgggtctggccggccatatgagaatgagatcttgttaataatcacctcaccgtgcaattaagtattgcgccattatttcatgtgacagcaaaaggtgatgctgtgctgccgctgtcatgtctaagcagcctttttcatctatcatgcatgcatctctcatgtttttgttttggttgccttgttggttccgagcccgtgacagtctgactgactcactcacggtgaatgaagtgaaaaagataagaggtccgggaggggtagtagtagtaaaggttaataaacgtggatttacaagcatgcatggtcctactgtagtatagctaatgacagcattgttgttgccggccgttgatgacgacggacggtatgtgatgcatgcgatcgatgcaggtatgggcaggtgttcaagtcccacctgttctgcacccccacggtggtgtcctgcgaccaggacctcaaccacttcatcctgcagaacgaggagcggctgttccagtgcagctaccccaggccgatccatggcatcctgggcaagtcctccatgctcgtggtcctgggcgaggaccacaagcgcctcaggaacctcgccctcgccctcgtcacctccaccaagctcaagcccagctacctcggcgacatcgagaagatcgcgctgcacgtcgtcggcgcatggcgacgacacgacggcggcggcggcggcggcggcggcggcggcgtcagagtcatcgccttctgcgaggaggcaagaaaggttagctagcagctattcaccgatcgaaagaatcgccatgttgcctctgcatgaatcgatcggtcttttgccatggtgactttgtttgacttacaacttacaagggttgtttcttccttgcctttccttcctctgggtcggccggccgtgtcctctgctctgtccttgagaagcacagttcgcattcagtgtgatagtgaagcaggtgctggggctgtcaccagaggagccggtcactgcaaggatactggaggacttcctggccttcatgaagggcctcatctccttccctctctacatcccagggaccccatatgccaaggctgtccaggtaatcatccaccatgtctttagtagcacatgccatgcttgcattaataaagaaccatcgatctcttcattagtatatatgtgcttattacatcagtgaggaatacagtatatagctgtggtttattttgttgcattaattatctgctgctcctaataatatgaatcctaatggcaggcgagggagaggatatccaacactgtgaagggcatcatcgaggagcggaggagtgctgggtcatgcaacaagggtgacttccttgacgtgctgctgtcaagcaacgagctctctgacgaggagaaagtgagcttcgtgctggactccctgctgggaggatatgagaccacctcgctcctcatctccatggtcgtttacttccttgggcagtctgctcaagatctggacctggttaaggtaatttatgcctgctttattttaaacttctgtgaaggcactctgctaatttatttttatgctggtggccatcaataaattaaactatccatgaacatgcagagggagcacgacagcataagatccaacaaagggaaggaggagtgcttgacttcagaagactacaagaagatggaatatacccaacaagtgagatagatgatcattcattcaatatgtacatgatagtattagacacatggcagtaatttgtaatccctccactccaaggattttgaatttctgttagcagcaacagcaacccacacaaatacttgaatctccaaaaacattagattttttttattttttttgctgtaagtaaatcaatatatacatatgtatgtggaaatgctgttgtcatgctgatgacgtggtggttgcatgctcttgttgcaggttatcaacgaggcgctgagatgtggcaacattgtcaagtttgtccaccggaaggcgctcaaagatgtcaaatacaaaggtgagatgaatgaagcccctcctgcatttcgcggcagattccatttgtgctcatcacatgataatggatcaggcagaggggatggtcgcacctttaagcctgatttttaagcattgttatgcccagaatacctcctagcttttgctaaacgaagatgctcaaaagcaagtggctctcccttttgctctgttgcagagtatctgattccatctggctggaaggtcctaccggtcttcagcgctgttcatctgaacccctcacttcatggaaacgcacaacagtttcagccctgtagatgggaggtacgtaccttgttttctttctcactgagactccttcctaatcactgttctggcaatgatccaatgattcatgttccataaataggcaagcttagcctacatattcaaaactgaaatatacaaataaaaggctgaggacctatcaaacaagcttatcaggggcttttagggaatcttctttaaagtgtgtactctaactaattgctacctttaattagtgtgtgtccatctgtgacataattactcacaactgttctggtatcttcagatgccaagcatgctgctgcctgatgtagtgcttgttgttaatggtcctaaccatgattccgttcgttgaaagccagccctctgggctttgttcctttttttttgtttaatgatgttcatggtttcattcatatgtgtgactcatctgattgatataccaggggacaagccaagggacaagcaagaggtttacaccgttcggtggtggcccccggctctgcccaggatcagagcttgctaaagtagaggctgctttcttcctccatcaccttgtcctcaattataggtaaaaacaatggatggccttagtcaaagcatagtatgcatcaacatcgtgcaaatttctagccaacataaggaaataatgtcaggaccgttttaatccaaatagaacaatatctgtcaggccatgaacgtaaaagcaaaataatgcagtaatcattgaacatttgaaccacatgctaggaagtaatggcaagaaggttatgacaacactgttaaatacaaaaatatgatgaggcataaatggacaaggacccagaataatgaggtcatttgtgtcagaccaatagtaagaaaaaaatatagcaagtgatggccacaaggttaagataagaactggtctctctaatttatgtttttatcgacagggaccacaagtcacagaataaatgtttaagtaattttggatccagaactgtagaacatatcagacgacaacaaacagaacaaacattggcagcattaggttttcgacaagtaggttttgcaagttgaggggtatcatacgagatatagaattctgcaatgtgatcaaactgtcaaatgttgtccatataaccatctgaatgtgacaaatgactagctattgtcatttttatttcagagtagtaaaatcacttaacagttttcgaaatgccattagatgatcatcgcttttcggttcttgaaaaccttgcagatggagaattgatggcgatgacattccgatggcatacccatatgtggagtttcagagaggtctgccaatagaaatcgagccaacttcacctgaatctggactgtcctgaagcttgagccgcagcgcgttcatcagttagtagtacgccagagagaaaggggaagaaggtgcatggagcatatacatgaaggatcagtgacaaatcccataaattaaggaaacactgagcacgggctagtagctagcatgaggcagctgagactgtaatttgatgtacatggtgtagatatattttgtccatggcaattgcttgaggtggttgattcacttcaccctgtaaaacattctccagtggttcaagtactatcctataaaaaagaagggcccctgggtttcgtaaggttctcgtcatctaactttgtaggactcagctagatatcgttactaacaactggctgtagttccgttctggagtcaggacgcggcatacagctgcaagatgaaaatgccaaaaaggggggcaaagtttgtttgacatttgatcagccacaagttctgttctagagtcaggaagcggtacacatcaagaggaaaatttcaaaaaagttctgatctagagccaggatgcaggatacagctgcaggattgaaaatgtaaaaagaaggaaaagaaaaatagcaggatacagcagcaagttgaaaatgtaaaaaaagaaaaaaatacaaaaaaaattggcccatgcaggtctcgaacctgcgaccttcgcgttattagcacgacgctctaaccaactgagctaataggccaacttgtgagttatacacttatacagttacttattggacacttgtacagttatttattgtactacatgtcatatgtggcgatcaactgctaacgaaaacaatgttgtttcattcaaagtaaaatcatgatttcatcccaaagcatcgtttattcatgagaatgataatatcaac

SEQ ID NO: 301 - DNA, 1731 bp, synthetic construct
  source 1..1731: mol_type = other DNA; note = Myb80 cDNA sequence - EES12341
cgccgggcgcatgccgccggcagcatcagcagcagcaggagccagtagccgcggctcgcacgcacgagcgggtgcgcccggcgcgcctatttatgcgcccgagcgcgcagtgtgagcgccgcactagggcactgctgcttgctcactccgcggagccgtggcgtggcgtcgcagcagggccggctcccgtgccactccgaccgagaccgcaggcgcgtgcgagaaataccagagccggagccgcggagcgcgaggacgatggggcggatcccgtgctgcgagaaggacagcgtcaagcgcgggcagtggacgcccgaggaggacaacaagctgctctcctacatcacccagtacggcacgcgtaactggcgcctcatccccaagaatgccggattgcagcggtgcgggaagagctgccggctccggtggaccaactacctgcggccggacctcaagcacggcgagttcacggacgccgaggagcagaccatcatcaagctgcactccgtcgtcggcaacaggtggtcggtgatcgcggcgcagctgccggggcggacggacaacgacgtcaagaaccactggaacaccaagctgaagaagaagctgtccgggatgggcatcgaccccgtcacgcacaagtccttctcccacctcatggccgagatcgccaccacgctggcgccgccgcaggtggcgcacctcgccgaggccgcgctgggttgcttcaaggacgagatgctccacctcctcaccaagaagcggcccaccgacttcccttcccccgcggtgccccccgacatggcgacgatcgccggcggctccggcgcgggcgctctcggcgcgccgccctgcggcttcccggcgccgccccagaccgacgacaccatcgagcgcatcaagctgggcctgtcgcgcgccatcatgagcgagcccggcgcgcccccaggcaagcagcagcagccgccctgggcgccggccgacgtgacagaggggctggcggggatgtacgccacgtacaaccccgccacgcacgcgcaggaggagttcaggtacgacaacggggcggtgccggagtacgtcctcggaggcgccggcgccggcggcgacgcggaccagggcacgtccatgtggagccaccagagcatgtacagcgggagttcgggcacagaggccgcgcccaggccgatggcggcgttgccggagaaaggcaatgacagcgtcgggagcagcggcggcggcggcggcggcggcggcgacgaggaggcggacgacgtcaaggacggcgggaagggtggctccgacatgtccggcctctttggctccgactgtgtactctgggacttgcccgacgagctaaccaatcacatggtgtaactacagtctacagatcgtgccaagtcgccaggatcaaagagcgtttcatcaaggagtatatatataaacttaaaaagaagcaccagaacaaattattgccaaaatgttttataaacttgaataaggaatatgaaaatcgtgtatatatttttgccatttgacaaggataagaatgtgcatatagaaccgaggagaccatgcaattttagttttggaatcctctgtttcaggggctggtgctcagagtaatgacagttcaactgcaaaacctcaaattgttttgtccatttcaactcgagttgtctaattactgtatgtcactacaaagaaaatttccacattttcctggggtttaaa

SEQ ID NO: 302 - DNA, 1116 bp, synthetic construct
  source 1..1116: mol_type = other DNA; note = Myb80 coding sequence - EES12341
atggggcggatcccgtgctgcgagaaggacagcgtcaagcgcgggcagtggacgcccgaggaggacaacaagctgctctcctacatcacccagtacggcacgcgtaactggcgcctcatccccaagaatgccggattgcagcggtgcgggaagagctgccggctccggtggaccaactacctgcggccggacctcaagcacggcgagttcacggacgccgaggagcagaccatcatcaagctgcactccgtcgtcggcaacaggtggtcggtgatcgcggcgcagctgccggggcggacggacaacgacgtcaagaaccactggaacaccaagctgaagaagaagctgtccgggatgggcatcgaccccgtcacgcacaagtccttctcccacctcatggccgagatcgccaccacgctggcgccgccgcaggtggcgcacctcgccgaggccgcgctgggttgcttcaaggacgagatgctccacctcctcaccaagaagcggcccaccgacttcccttcccccgcggtgccccccgacatggcgacgatcgccggcggctccggcgcgggcgctctcggcgcgccgccctgcggcttcccggcgccgccccagaccgacgacaccatcgagcgcatcaagctgggcctgtcgcgcgccatcatgagcgagcccggcgcgcccccaggcaagcagcagcagccgccctgggcgccggccgacgtgacagaggggctggcggggatgtacgccacgtacaaccccgccacgcacgcgcaggaggagttcaggtacgacaacggggcggtgccggagtacgtcctcggaggcgccggcgccggcggcgacgcggaccagggcacgtccatgtggagccaccagagcatgtacagcgggagttcgggcacagaggccgcgcccaggccgatggcggcgttgccggagaaaggcaatgacagcgtcgggagcagcggcggcggcggcggcggcggcggcgacgaggaggcggacgacgtcaaggacggcgggaagggtggctccgacatgtccggcctctttggctccgactgtgtactctgggacttgcccgacgagctaaccaatcacatggtgtaa

SEQ ID NO: 303 - protein, 371 aa, synthetic construct
  source 1..371: note = Myb80 protein sequence - EES12341
MGRIPCCEKDSVKRGQWTPEEDNKLLSYITQYGTRNWRLIPKNAGLQRCGKSCRLRWTNYLRPDLKHGEFTDAEEQTIIKLHSVVGNRWSVIAAQLPGRTDNDVKNHWNTKLKKKLSGMGIDPVTHKSFSHLMAEIATTLAPPQVAHLAEAALGCFKDEMLHLLTKKRPTDFPSPAVPPDMATIAGGSGAGALGAPPCGFPAPPQTDDTIERIKLGLSRAIMSEPGAPPGKQQQPPWAPADVTEGLAGMYATYNPATHAQEEFRYDNGAVPEYVLGGAGAGGDADQGTSMWSHQSMYSGSSGTEAAPRPMAALPEKGNDSVGSSGGGGGGGGDEEADDVKDGGKGGSDMSGLFGSDCVLWDLPDELTNHMV

SEQ ID NO: 304 - DNA, 3038 bp, Sorghum bicolor
  source 1..3038: mol_type = genomic DNA; note = Myb80 genomic sequence - Sorghum_bicolor_NCBIv3:6:48285459:48288496:-1
tagagcagtgtgtcccacctcacctctttagtttagattggagatttatggatacaaagtactcctacaacactgacagtagtactaaatctgtaactgtaatcgaacattagcagtgtggatgtgtgattagtcccttgaaagtccactgaaaattctccattccaattgccactgccaatttgacaaccggagcagaatgagctgatcgtctgctttgactgacggaggcaaagtactgaagaaccacgcagtcacgcacgcataacgcatccggcacgggcgcacggcaagggctgtgcactgccatcgtaaaagcacacgtccgtcaccccgtcgccggctcgccgcgccacgccacgcacgcgacgcgcggcgtcgatttgcgccgggagccggccgatgagacgcaaacgcgccgggcgcccggcgagggggggaggaaagcgccttcggttggaccgggggttgacccggcgctgtgcgggtgggcaacctgtccctgctccccgggggcggtcacgcgttgcgcgggcgttgaattctttatgccgctcatgcctccttcgcccgtgcgcgccgcgcccgccccttcccgtgcgccgggcgcatgccgccggcagcatcagcagcagcaggagccagtagccgcggctcgcacgcacgagcgggtgcgcccggcgcgcctatttatgcgcccgagcgcgcagtgtgagcgccgcactagggcactgctgcttgctcactccgcggagccgtggcgtggcgtcgcagcagggccggctcccgtgccactccgaccgagaccgcaggcgcgtgcgagaaataccagagccggagccgcggagcgcgaggacgatggggcggatcccgtgctgcgagaaggacagcgtcaagcgcgggcagtggacgcccgaggaggacaacaagctgctctcctacatcacccagtacggcacgcgtaactggcgcctcatccccaagaatgccggtacgtgtccgtcgtagcgagcgtccaaggcccgtaaggtcagaggacggccaatgtccgcctctgaattgtgtgaccgagttcgtgtgatggtattggtatggcaggattgcagcggtgcgggaagagctgccggctccggtggaccaactacctgcggccggacctcaagcacggcgagttcacggacgccgaggagcagaccatcatcaagctgcactccgtcgtcggcaacaggtggtcggtgatcgcggcgcagctgccggggcggacggacaacgacgtcaagaaccactggaacaccaagctgaagaagaagctgtccgggatgggcatcgaccccgtcacgcacaagtccttctcccacctcatggccgagatcgccaccacgctggcgccgccgcaggtggcgcacctcgccgaggccgcgctgggttgcttcaaggacgagatgctccacctcctcaccaagaagcggcccaccgacttcccttcccccgcggtgccccccgacatggcgacgatcgccggcggctccggcgcgggcgctctcggcgcgccgccctgcggcttcccggcgccgccccagaccgacgacaccatcgagcgcatcaagctgggcctgtcgcgcgccatcatgagcgagcccggcgcgcccccaggcaagcagcagcagccgccctgggcgccggccgacgtgacagaggggctggcggggatgtacgccacgtacaaccccgccacgcacgcgcaggaggagttcaggtacgacaacggggcggtgccggagtacgtcctcggaggcgccggcgccggcggcgacgcggaccagggcacgtccatgtggagccaccagagcatgtacagcgggagttcgggcacagaggccgcgcccaggccgatggcggcgttgccggagaaaggcaatgacagcgtcgggagcagcggcggcggcggcggcggcggcggcgacgaggaggcggacgacgtcaaggacggcgggaagggtggctccgacatgtccggcctctttggctccgactgtgtactctgggacttgcccgacgagctaaccaatcacatggtgtaactacagtctacagatcgtgccaagtcgccaggatcaaagagcgtttcatcaaggagtatatatataaacttaaaaagaagcaccagaacaaattattgccaaaatgttttataaacttgaataaggaatatgaaaatcgtgtatatatttttgccatttgacaaggataagaatgtgcatatagaaccgaggagaccatgcaattttagttttggaatcctctgtttcaggggctggtgctcagagtaatgacagttcaactgcaaaacctcaaattgttttgtccatttcaactcgagttgtctaattactgtatgtcactacaaagaaaatttccacattttcctggggtttaaatccttttttttatgtgaacttgttttatctgaaaaatgcagtgattctgtggattacagagacttcagaagggtcccgccttctttctttcctctctccgatcggacggtcatgacaagcccgctgtggggttgatagcatccgacggttacacagagcgcaccccccaagttcaccttcctgtacctggaaatcttccagagaatcccgttccacggttcccttcgtctttggtgttccatggcggcggcggcgcagctgcacggatcggctgcggccacggcggcatgtcgccggactcgagcctactcagttcgatcctcgtgccggtggccgcagagccttctagctggttccccgaaggtatgcctcggattcgcgtgctaaaccctaacttggtagtcttgaagctcttgcccctgtgtgtacgatggttctctgcgaagaacatggtataagggttacctggacatcggtcatgatcgtatgaaaatgagatcggatcgtgaagaggtgaggcagaagactcagaagaggttatttgatgtcttggtgttgatgggcattgggcaggaattgagatcttctttggctcgagat

SEQ ID NO: 305 - DNA, 1525 bp, synthetic construct
  source 1..1525: mol_type = other DNA
gagagagagaagcagagggcgagcaagtgaatgatagctagacagagaggcaaggcatggcaggctccatgcagcttgtgagatgtaactaggtagggtggggcggcggcggcggcggtggtgtggtggtacgagcatgatggtgggggtgggcgatcttgtgctggctgctccggcgatcctgctcgccttgctcctgactctggtgctgagccacttcctgcctttgctcctcaaccccaaggctccgaggggcagctttggatggccccttgtcggcgagaccctcaggttcctcacccctcacgcctccaacacgctgggtagcttcctggaggatcactgctccaggtatgggagggtgttcaagtcccatctgttctgcacccccaccgtagtgtcctgtgaccaggagctgaaccacttcatcctgcagaatgaggagaggttgttccagtgcagctaccccaggccaattcatggcatactgggcaagtcctccatgctggtggtcctcggggaggaccacaagcggctcaggaaccttgctctggccctcgtcacctccaccaagctcaagccaagctaccttggcgacattgagaggattgcgctgcacatagtcgggtcatggcacggcaagggcggcagcatcaccttctgcgaggaggcaagaaagtttgcgttcagtgtgatagtgaagcaggtgctggggctgtcgccagaggagcctgtcactgccatgatactggaggacttcctcaccttcatgaagggcctcatctctttccctctccgcatcccagggaccccatacgccaaagctgtccaggccagagagaggatatcaagcactgtgaagggcattatcgaggagaggaggaaggctgactgctgcaagagggatgatttcctcaacgtgctcctgtcaaccgatgaactctctgacgaggagaaagtgagctttgtgctggactccctgctaggaggatacgagaccacctcactcatgatctccatggtcgtctacttccttgggcagtcagctcaagatctggacctagtgaagagggagcatcaaggcataagatctaccaaagcaaaggaggagtgcttgagctctgaggactacaagaagatggaatatacccaacatgttatcaatgaggcgctgagatgtggaaacattgtcaagtttgtccacaggaaggccctcaaagatgtcagatacaaagagtatctgattccatctggctggaaggtcctacctgttttcagtgctgttcatttgaacccctcgcttcatggaaatgcccaacagtttcagccttgcagatgggagggcccaagccaaggtacaagcaagaagtttacaccattcggcggtggcaccaggctctgccctggatcagagcttgccaaagtagaggctgctttcttcctccatcaccttgtgctcaatttcagcatggagtatccaataagtatggcatgcaagttgagtggtaccaaatctggtccatag

SEQ ID NO: 306 - DNA, 1389 bp, synthetic construct
  source 1..1389: mol_type = other DNA
atgatggtgggggtgggcgatcttgtgctggctgctccggcgatcctgctcgccttgctcctgactctggtgctgagccacttcctgcctttgctcctcaaccccaaggctccgaggggcagctttggatggccccttgtcggcgagaccctcaggttcctcacccctcacgcctccaacacgctgggtagcttcctggaggatcactgctccaggtatgggagggtgttcaagtcccatctgttctgcacccccaccgtagtgtcctgtgaccaggagctgaaccacttcatcctgcagaatgaggagaggttgttccagtgcagctaccccaggccaattcatggcatactgggcaagtcctccatgctggtggtcctcggggaggaccacaagcggctcaggaaccttgctctggccctcgtcacctccaccaagctcaagccaagctaccttggcgacattgagaggattgcgctgcacatagtcgggtcatggcacggcaagggcggcagcatcaccttctgcgaggaggcaagaaagtttgcgttcagtgtgatagtgaagcaggtgctggggctgtcgccagaggagcctgtcactgccatgatactggaggacttcctcaccttcatgaagggcctcatctctttccctctccgcatcccagggaccccatacgccaaagctgtccaggccagagagaggatatcaagcactgtgaagggcattatcgaggagaggaggaaggctgactgctgcaagagggatgatttcctcaacgtgctcctgtcaaccgatgaactctctgacgaggagaaagtgagctttgtgctggactccctgctaggaggatacgagaccacctcactcatgatctccatggtcgtctacttccttgggcagtcagctcaagatctggacctagtgaagagggagcatcaaggcataagatctaccaaagcaaaggaggagtgcttgagctctgaggactacaagaagatggaatatacccaacatgttatcaatgaggcgctgagatgtggaaacattgtcaagtttgtccacaggaaggccctcaaagatgtcagatacaaagagtatctgattccatctggctggaaggtcctacctgttttcagtgctgttcatttgaacccctcgcttcatggaaatgcccaacagtttcagccttgcagatgggagggcccaagccaaggtacaagcaagaagtttacaccattcggcggtggcaccaggctctgccctggatcagagcttgccaaagtagaggctgctttcttcctccatcaccttgtgctcaatttcagcatggagtatccaataagtatggcatgcaagttgagtggtaccaaatctggtccatag

SEQ ID NO: 307 - protein, 462 aa, synthetic construct
MMVGVGDLVLAAPAILLALLLTLVLSHFLPLLLNPKAPRGSFGWPLVGETLRFLTPHASNTLGSFLEDHCSRYGRVFKSHLFCTPTVVSCDQELNHFILQNEERLFQCSYPRPIHGILGKSSMLVVLGEDHKRLRNLALALVTSTKLKPSYLGDIERIALHIVGSWHGKGGSITFCEEARKFAFSVIVKQVLGLSPEEPVTAMILEDFLTFMKGLISFPLRIPGTPYAKAVQARERISSTVKGIIEERRKADCCKRDDFLNVLLSTDELSDEEKVSFVLDSLLGGYETTSLMISMVVYFLGQSAQDLDLVKREHQGIRSTKAKEECLSSEDYKKMEYTQHVINEALRCGNIVKFVHRKALKDVRYKEYLIPSGWKVLPVFSAVHLNPSLHGNAQQFQPCRWEGPSQGTSKKFTPFGGGTRLCPGSELAKVEAAFFLHHLVLNFSMEYPISMACKLSGTKSGP

SEQ ID NO: 308 - DNA, 1870 bp, synthetic construct
  source 1..1870: mol_type = other DNA
gagagagagaagcagagggcgagcaagtgaatgatagctagacagagaggcaaggcatggcaggctccatgcagcttgtgagatgtaactaggtagggtggggcggcggcggcggcggtggtgtggtggtacgagcatgatggtgggggtgggcgatcttgtgctggctgctccggcgatcctgctcgccttgctcctgactctggtgctgagccacttcctgcctttgctcctcaaccccaaggctccgaggggcagctttggatggccccttgtcggcgagaccctcaggttcctcacccctcacgcctccaacacgctgggtagcttcctggaggatcactgctccaggtatgggagggtgttcaagtcccatctgttctgcacccccaccgtagtgtcctgtgaccaggagctgaaccacttcatcctgcagaatgaggagaggttgttccagtgcagctaccccaggccaattcatggcatactgggcaagtcctccatgctggtggtcctcggggaggaccacaagcggctcaggaaccttgctctggccctcgtcacctccaccaagctcaagccaagctaccttggcgacattgagaggattgcgctgcacatagtcgggtcatggcacggcaagggcggcagcatcaccttctgcgaggaggcaagaaagtttgcgttcagtgtgatagtgaagcaggtgctggggctgtcgccagaggagcctgtcactgccatgatactggaggacttcctcaccttcatgaagggcctcatctctttccctctccgcatcccagggaccccatacgccaaagctgtccaggccagagagaggatatcaagcactgtgaagggcattatcgaggagaggaggaaggctgactgctgcaagagggatgatttcctcaacgtgctcctgtcaaccgatgaactctctgacgaggagaaagtgagctttgtgctggactccctgctaggaggatacgagaccacctcactcatgatctccatggtcgtctacttccttgggcagtcagctcaagatctggacctagtgaagagggagcatcaaggcataagatctaccaaagcaaaggaggagtgcttgagctctgaggactacaagaagatggaatatacccaacatgttatcaatgaggcgctgagatgtggaaacattgtcaagtttgtccacaggaaggccctcaaagatgtcagatacaaagagtatctgattccatctggctggaaggtcctacctgttttcagtgctgttcatttgaacccctcgcttcatggaaatgcccaacagtttcagccttgcagatgggagggcccaagccaaggtacaagcaagaagtttacaccattcggcggtggcaccaggctctgccctggatcagagcttgccaaagtagaggctgctttcttcctccatcaccttgtgctcaatttcagatggaaaatcgatggcgatgacattccaatggcatacccgtacgtggagttcccgagaggcctgccgatagaaatcgagccgatttgctctgaatcttgactgggttcttgcagctgcaaacatggcggtgagtgaaaaaagagattgcaagcagtgaagcgaagaagcaccgatgactagcttagcttagctagttcctggaatggggtagctgaggaggttgtgatctcctctgtacatggtgtacatatattttgtccattgtgattacttgaggtggttgggtcaccctgttacatcctccactgtctggactactatcctatagaaaaaaaatgggctcctggtgtttacatttacttctgaaattcgttatggggagatatgtatgaaccggacctc

SEQ ID NO: 309 - DNA, 1431 bp, synthetic construct
  source 1..1431: mol_type = other DNA
atgatggtgggggtgggcgatcttgtgctggctgctccggcgatcctgctcgccttgctcctgactctggtgctgagccacttcctgcctttgctcctcaaccccaaggctccgaggggcagctttggatggccccttgtcggcgagaccctcaggttcctcacccctcacgcctccaacacgctgggtagcttcctggaggatcactgctccaggtatgggagggtgttcaagtcccatctgttctgcacccccaccgtagtgtcctgtgaccaggagctgaaccacttcatcctgcagaatgaggagaggttgttccagtgcagctaccccaggccaattcatggcatactgggcaagtcctccatgctggtggtcctcggggaggaccacaagcggctcaggaaccttgctctggccctcgtcacctccaccaagctcaagccaagctaccttggcgacattgagaggattgcgctgcacatagtcgggtcatggcacggcaagggcggcagcatcaccttctgcgaggaggcaagaaagtttgcgttcagtgtgatagtgaagcaggtgctggggctgtcgccagaggagcctgtcactgccatgatactggaggacttcctcaccttcatgaagggcctcatctctttccctctccgcatcccagggaccccatacgccaaagctgtccaggccagagagaggatatcaagcactgtgaagggcattatcgaggagaggaggaaggctgactgctgcaagagggatgatttcctcaacgtgctcctgtcaaccgatgaactctctgacgaggagaaagtgagctttgtgctggactccctgctaggaggatacgagaccacctcactcatgatctccatggtcgtctacttccttgggcagtcagctcaagatctggacctagtgaagagggagcatcaaggcataagatctaccaaagcaaaggaggagtgcttgagctctgaggactacaagaagatggaatatacccaacatgttatcaatgaggcgctgagatgtggaaacattgtcaagtttgtccacaggaaggccctcaaagatgtcagatacaaagagtatctgattccatctggctggaaggtcctacctgttttcagtgctgttcatttgaacccctcgcttcatggaaatgcccaacagtttcagccttgcagatgggagggcccaagccaaggtacaagcaagaagtttacaccattcggcggtggcaccaggctctgccctggatcagagcttgccaaagtagaggctgctttcttcctccatcaccttgtgctcaatttcagatggaaaatcgatggcgatgacattccaatggcatacccgtacgtggagttcccgagaggcctgccgatagaaatcgagccgatttgctctgaatcttga

SEQ ID NO: 310 - protein, 476 aa, synthetic construct
  source 1..476: note = Dwarf11-A protein sequence - TraesCS2A02G331800.1
MMVGVGDLVLAAPAILLALLLTLVLSHFLPLLLNPKAPRGSFGWPLVGETLRFLTPHASNTLGSFLEDHCSRYGRVFKSHLFCTPTVVSCDQELNHFILQNEERLFQCSYPRPIHGILGKSSMLVVLGEDHKRLRNLALALVTSTKLKPSYLGDIERIALHIVGSWHGKGGSITFCEEARKFAFSVIVKQVLGLSPEEPVTAMILEDFLTFMKGLISFPLRIPGTPYAKAVQARERISSTVKGIIEERRKADCCKRDDFLNVLLSTDELSDEEKVSFVLDSLLGGYETTSLMISMVVYFLGQSAQDLDLVKREHQGIRSTKAKEECLSSEDYKKMEYTQHVINEALRCGNIVKFVHRKALKDVRYKEYLIPSGWKVLPVFSAVHLNPSLHGNAQQFQPCRWEGPSQGTSKKFTPFGGGTRLCPGSELAKVEAAFFLHHLVLNFRWKIDGDDIPMAYPYVEFPRGLPIEIEPICSES

SEQ ID NO: 311 - DNA, 5249 bp, Triticum aestivum
  source 1..5249: mol_type = genomic DNA; note = Dwarf11-A genomic sequence - IWGSC:2A:564616207:564621455:-1
aaggacatgataacaagaacactgctcaaacgagttaccatcggcagaaaaatagaatttcacacaattaaactaatcaagcacagtactatacggtctgctgtgaccaaaactggcactcgatctagttttcagattagcacaagttattatttcagacgcaaggtgcagaccttcacagctcagcaccaaagtcctatgcgcgcatgtaacccgatacaatttctctctctacctgcgcgtttgactgcaccttgagcagcagcagcagcagcagcagcagcctagatgctagtagtactgcaaagggaccatactcctagctagacccagccccttgctgataaaagtcattcatacagttcaaatagtatgagtatacatacaagtacaagcagccgggtctgcagtaaaaacagagatcaagccagtagtaaatatatactgctagtggtgtttttgagtacagtagtaattaaaaaaggccaaagcaagaaaacaaaaggcaaccttatttttcctttccctcccgcattgcaaagatccttcctgcccttgctcccactactatatagcctccccctcaccttccattccagagagagagagaagcagagggcgagcaagtgaatgatagctagacagagaggcaaggcatggcaggctccatgcagcttgtgagatgtaactaggtagggtggggcggcggcggcggcggtggtgtggtggtacgagcatgatggtgggggtgggcgatcttgtgctggctgctccggcgatcctgctcgccttgctcctgactctggtgctgagccacttcctgcctttgctcctcaaccccaaggctccgaggggcagctttggatggccccttgtcggcgagaccctcaggttcctcacccctcacgcctccaacacgctgggtagcttcctggaggatcactgctccaggtacttttattttcttcttcttttttgttatcattcaccacagccacaccacacctcaagatttctccacgatgcaatcaagcacgtagtattgtttatcatttactcatgtggcagcaaaagatgatgcatgtcgtgcatgttgtcctgactcagcacctttatcttcctgtctttgctccaaggctgtgatatatttgaatttctacaggttttgtgcacagaacctgtttctgaaaaagttttacctattgttttgtgggggagagaggatggaaagatctcataagaccccctatcaaatgatggcaacttaacaacatgaaaaaagatctaacattgcagttgatgtgatgatgatgcaggtatgggagggtgttcaagtcccatctgttctgcacccccaccgtagtgtcctgtgaccaggagctgaaccacttcatcctgcagaatgaggagaggttgttccagtgcagctaccccaggccaattcatggcatactgggcaagtcctccatgctggtggtcctcggggaggaccacaagcggctcaggaaccttgctctggccctcgtcacctccaccaagctcaagccaagctaccttggcgacattgagaggattgcgctgcacatagtcgggtcatggcacggcaagggcggcagcatcaccttctgcgaggaggcaagaaaggttggtctccccgtgcatgcactaactacaaccaaagctggctaggcatgcatcagtagggacatgatcccgtcaaacatggacgaaaaactctgcacatgttacctatggctacatcatcatgctgttacttgctgatgcatcatcacatattttttcaaacgctggctttgacttaccagggtcattcttctccgtattttgactctctttttctgactttttttttcctttggcacagtttgcgttcagtgtgatagtgaagcaggtgctggggctgtcgccagaggagcctgtcactgccatgatactggaggacttcctcaccttcatgaagggcctcatctctttccctctccgcatcccagggaccccatacgccaaagctgtccaggtaactaagtaaacaactctggaataccaccttcttaaactgtcaaagtttccagcacttcttatctacttcaccatgcatcaggctcatgaaactctggtatatattgttctaacactgactgaggttcttgggtatgccgatcattcctcacaggccagagagaggatatcaagcactgtgaagggcattatcgaggagaggaggaaggctgactgctgcaagagggatgatttcctcaacgtgctcctgtcaaccgatgaactctctgacgaggagaaagtgagctttgtgctggactccctgctaggaggatacgagaccacctcactcatgatctccatggtcgtctacttccttgggcagtcagctcaagatctggacctagtgaaggtacatacatacctgatcaagcttaagccacaggtgattggtggttgcgtgcatgtgtcacttattatatatgaacatgctgtgcatgcagagggagcatcaaggcataagatctaccaaagcaaaggaggagtgcttgagctctgaggactacaagaagatggaatatacccaacatgtaagtaagatgatgatcattcagtacacgctttaggatatgtagccggttggtaagcagggatccttttttctttctattatcagacatccaccaaatatgtgacccttcagaatttatgttttttctgtccgtatgcctgcctatatctggaattttgactagagcaaacaacactttgcaagaacagtgcaaatggggaaggaagggtctcttaatttgttctgtaataattggaatggttcaatgatacatacatacatgcgtggatgtcctttcaggttatcaatgaggcgctgagatgtggaaacattgtcaagtttgtccacaggaaggccctcaaagatgtcagatacaaaggtaattaaccctgctagtacttggggctttcccagcagatcccattgtgctcatcacatgataatggatcaggcaaagggggcggttgggcctttattgctgatttgtgagcattgttattcctaaacacctagcttttgatagaagatgctcaaaagcaagtggacctcttcttttgctctgttgcagagtatctgattccatctggctggaaggtcctacctgttttcagtgctgttcatttgaacccctcgcttcatggaaatgcccaacagtttcagccttgcagatgggaggtatgtctgatttccataccatgtgcacgggcatctatatttgtagtcaagtaatgaatacatcttagtttatgcagattagctttaatataatatgcttgtttagggaagcctaactttgacataatatgctttttatgaactattttatacaatgaaaaggtgagaacaaatcagaagagcttatctgtagctttgagagaatcttctttaaggttgctctgttaactaattgatgcctttaattagtgagtgtccaactaacccatgccataataattacttgcaactatcctggtatcttcagatgccaagcaggctttggctgagggcctagtgccttctgtacatggtcctaaccatgattcctcactcaaagccagcatccttggctttgcttcttcattttcttaactcccttgatgaagctagctcatatgcatgacttgtacaattgattgatgcaacagggcccaagccaaggtacaagcaagaagtttacaccattcggcggtggcaccaggctctgccctggatcagagcttgccaaagtagaggctgctttcttcctccatcaccttgtgctcaatttcaggtaaaacatttctcctagccgattaagagatacacatgtagcaactaacgcagcaagagcaacaaatcggagaaacgaagaacctaaatattttgtaaggataaatcaacttaagaatgaaattaaccagaggaaatatgaatagcatgaccacagattgatgcagtctcatactagtggagatgctctgcaaacatggcagcatggagtatccaataagtatggcatgcaagttgagtggtaccaaatctggtccatagatatctgcagttatcagattgtgacagaagaaaatgcatctccctctactttttttcagagcaaggagataagtgcttactgaatctctatagttactgatcatggtataatttggcaccctgcagatggaaaatcgatggcgatgacattccaatggcatacccgtacgtggagttcccgagaggcctgccgatagaaatcgagccgatttgctctgaatcttgactgggttcttgcagctgcaaacatggcggtgagtgaaaaaagagattgcaagcagtgaagcgaagaagcaccgatgactagcttagcttagctagttcctggaatggggtagctgaggaggttgtgatctcctctgtacatggtgtacatatattttgtccattgtgattacttgaggtggttgggtcaccctgttacatcctccactgtctggactactatcctatagaaaaaaaatgggctcctggtgtttacatttacttctgaaattcgttatggggagatatgtatgaaccggacctcactgaaacttcgaaacaacgttcttatccttgccaaacagaccatgtaagtcccaaaaaataaagaccatgtaagagaacattgggaatttggcataagcacaccagtcagcagagagtgaagttattgtttaaaactggtactattaacctttagtgtttacaaagattcatgtaaatcagtatggggagattctacaagggacatttggatagaacgaacaagtccttcagaattcagttgaaactcccatgctcaaatggataatgagaggagatcaatgaacagaggctttgttcaggagtttagagaatgattgcagaaaaactatggcccatacaggtctcgaacctgtgaccttcgcgttattagcacgacgctctaaccagctgagctaataggccttgtgtgtaaactgagccagtaaagcacttatatatgaatcatatattttcgtaagttccagaatcagtcaaagcgtatgacctctcttatttttttttccagttccaaatcagtcagggcgtatgttggagaaaatatgacatactggcagacgacaatacgctcgactctaagggcatgtacaatgatggcata

SEQ ID NO: 312 - DNA, 1976 bp, synthetic construct
  source 1..1976: mol_type = other DNA; note = Dwarf11-B cDNA sequence - TraesCS2B02G350400.2
gagagagagagaagcagagggcgagcaagtgaatgatagctagacagacagacagacagagaggcaaggcatggcaggctccatgcagcttgtgagatgtaactaggtagggtggggcggtggcggtggtggtgtgtggtatgagcatgatggtgggggtgggcgatcttgtgctggctgctccggcgatcctgctcgccttgctcctgactctggtgctgagccacttcctgcctttgctcctcaaccccaaggctccaagaggcagctttggatggccccttgttggagagaccctcaggttcctcacccctcacgcctccaacacgctgggtagcttcctggaggatcactgctccaggtatgggagggtgttcaagtcccatctgttctgcacccccaccgtagtgtcctgtgaccaggagctgaaccacttcatcctgcagaatgaggagaggctgttccagtgcagctaccccaggccaattcatggcatactgggcaagtcctccatgctggtggtcctgggggaggaccacaagcggctcaggaaccttgctctggccctggtcacctccacaaagctcaagccaagctaccttggcgacattgagaagattgcgctgcacatagtcggatcatggcatggcaagggcggcaacatcaccttctgcgaggaggcaagaaagtttgcattcagtgtgatagtgaagcaggtgctggcgctgtcaccagaggagcctgtcactgccatgatactggaggacttcctcaccttcatgaagggcctcatctctttccctctccgcatcccagggaccccatacgccaaagctgtccaggccagagagaggatatcaagcactgtgaagggcatcattgaggagaggaggaaggctgactgctgcaagaaggatgatttcctcaacgtgctcctgtcaaccgatgagctctctgacgaggagaaagtgagttttgtgctggactccctgctaggggggtatgagaccacctcactcatgatatccatggtcgtctacttccttgggcagtcagctcaagatctagacctggtgaagagggagcatcaaggcataagatctaccaaagcaaaggaggagtgcttgagctctgaggactacaagaagatggaatatacccaacatgttatcaatgaggcgctgagatgtggaaacattgtcaagtttgtccacaggaaggccctcaaagatgtcagatacaaagagtatctgattccatctggctggaaggtcctacctgtttttagtgctgttcatttgaacccctcacttcatggaaatgcccaacagtttcagccttgcagatgggagggcccaagccaaggtacaagcaagaagtttacgccgttcggcggtggcaccaggctctgccctggatcagagctcgccaaagtagaggctgctttcttcctccatcaccttgtgctcaatttcagatggaaaatcgatggcgatgacattccaatggcatacccgtacgtggagttcccgagaggcctgccgatagaaatcgagccgatttgctctgaatcttgactgggttcttgcagctgcagacatggtggtgggtgaaaaaagagattgcaagcaatgaagaagcaccgatgactagcttagcttagctagttgctggaatggggtagctgaggaggttatgatctcctctgtacatggtgtacatatattttatccattgtgattacttgaggtggttgggtcaccctgttacatcctccactgtctggactactatcctatagaaaaaaaaatgggctcctggtgtttacatttacttctgaaattcagtatggggagatatgtatgaaccagacctcactgaaacttcgaaacaacgttcctattcttaccaaatagaccatgtatgagggaacattgacataagcacgccagtgaacagagagtgaagttattgcc

SEQ ID NO: 313 - DNA, 1428 bp, synthetic construct
  source 1..1428: mol_type = other DNA; note = Dwarf11-B coding sequence - TraesCS2B02G350400.2
atggtgggggtgggcgatcttgtgctggctgctccggcgatcctgctcgccttgctcctgactctggtgctgagccacttcctgcctttgctcctcaaccccaaggctccaagaggcagctttggatggccccttgttggagagaccctcaggttcctcacccctcacgcctccaacacgctgggtagcttcctggaggatcactgctccaggtatgggagggtgttcaagtcccatctgttctgcacccccaccgtagtgtcctgtgaccaggagctgaaccacttcatcctgcagaatgaggagaggctgttccagtgcagctaccccaggccaattcatggcatactgggcaagtcctccatgctggtggtcctgggggaggaccacaagcggctcaggaaccttgctctggccctggtcacctccacaaagctcaagccaagctaccttggcgacattgagaagattgcgctgcacatagtcggatcatggcatggcaagggcggcaacatcaccttctgcgaggaggcaagaaagtttgcattcagtgtgatagtgaagcaggtgctggcgctgtcaccagaggagcctgtcactgccatgatactggaggacttcctcaccttcatgaagggcctcatctctttccctctccgcatcccagggaccccatacgccaaagctgtccaggccagagagaggatatcaagcactgtgaagggcatcattgaggagaggaggaaggctgactgctgcaagaaggatgatttcctcaacgtgctcctgtcaaccgatgagctctctgacgaggagaaagtgagttttgtgctggactccctgctaggggggtatgagaccacctcactcatgatatccatggtcgtctacttccttgggcagtcagctcaagatctagacctggtgaagagggagcatcaaggcataagatctaccaaagcaaaggaggagtgcttgagctctgaggactacaagaagatggaatatacccaacatgttatcaatgaggcgctgagatgtggaaacattgtcaagtttgtccacaggaaggccctcaaagatgtcagatacaaagagtatctgattccatctggctggaaggtcctacctgtttttagtgctgttcatttgaacccctcacttcatggaaatgcccaacagtttcagccttgcagatgggagggcccaagccaaggtacaagcaagaagtttacgccgttcggcggtggcaccaggctctgccctggatcagagctcgccaaagtagaggctgctttcttcctccatcaccttgtgctcaatttcagatggaaaatcgatggcgatgacattccaatggcatacccgtacgtggagttcccgagaggcctgccgatagaaatcgagccgatttgctctgaatcttga

SEQ ID NO: 314 - protein, 475 aa, synthetic construct
  source 1..475: note = Dwarf11-B protein sequence - TraesCS2B02G350400.2
MVGVGDLVLAAPAILLALLLTLVLSHFLPLLLNPKAPRGSFGWPLVGETLRFLTPHASNTLGSFLEDHCSRYGRVFKSHLFCTPTVVSCDQELNHFILQNEERLFQCSYPRPIHGILGKSSMLVVLGEDHKRLRNLALALVTSTKLKPSYLGDIEKIALHIVGSWHGKGGNITFCEEARKFAFSVIVKQVLALSPEEPVTAMILEDFLTFMKGLISFPLRIPGTPYAKAVQARERISSTVKGIIEERRKADCCKKDDFLNVLLSTDELSDEEKVSFVLDSLLGGYETTSLMISMVVYFLGQSAQDLDLVKREHQGIRSTKAKEECLSSEDYKKMEYTQHVINEALRCGNIVKFVHRKALKDVRYKEYLIPSGWKVLPVFSAVHLNPSLHGNAQQFQPCRWEGPSQGTSKKFTPFGGGTRLCPGSELAKVEAAFFLHHLVLNFRWKIDGDDIPMAYPYVEFPRGLPIEIEPICSES

SEQ ID NO: 315 - DNA, 2069 bp, synthetic construct
  source 1..2069: mol_type = other DNA; note = Dwarf11-B cDNA sequence - TraesCS2B02G350400.1
gagagagagagaagcagagggcgagcaagtgaatgatagctagacagacagacagacagagaggcaaggcatggcaggctccatgcagcttgtgagatgtaactaggtagggtggggcggtggcggtggtggtgtgtggtatgagcatgatggtgggggtgggcgatcttgtgctggctgctccggcgatcctgctcgccttgctcctgactctggtgctgagccacttcctgcctttgctcctcaaccccaaggctccaagaggcagctttggatggccccttgttggagagaccctcaggttcctcacccctcacgcctccaacacgctgggtagcttcctggaggatcactgctccaggtatgggagggtgttcaagtcccatctgttctgcacccccaccgtagtgtcctgtgaccaggagctgaaccacttcatcctgcagaatgaggagaggctgttccagtgcagctaccccaggccaattcatggcatactgggcaagtcctccatgctggtggtcctgggggaggaccacaagcggctcaggaaccttgctctggccctggtcacctccacaaagctcaagccaagctaccttggcgacattgagaagattgcgctgcacatagtcggatcatggcatggcaagggcggcaacatcaccttctgcgaggaggcaagaaagtttgcattcagtgtgatagtgaagcaggtgctggcgctgtcaccagaggagcctgtcactgccatgatactggaggacttcctcaccttcatgaagggcctcatctctttccctctccgcatcccagggaccccatacgccaaagctgtccaggccagagagaggatatcaagcactgtgaagggcatcattgaggagaggaggaaggctgactgctgcaagaaggatgatttcctcaacgtgctcctgtcaaccgatgagctctctgacgaggagaaagtgagttttgtgctggactccctgctaggggggtatgagaccacctcactcatgatatccatggtcgtctacttccttgggcagtcagctcaagatctagacctggtgaagagggagcatcaaggcataagatctaccaaagcaaaggaggagtgcttgagctctgaggactacaagaagatggaatatacccaacatgttatcaatgaggcgctgagatgtggaaacattgtcaagtttgtccacaggaaggccctcaaagatgtcagatacaaagagtatctgattccatctggctggaaggtcctacctgtttttagtgctgttcatttgaacccctcacttcatggaaatgcccaacagtttcagccttgcagatgggagggcccaagccaaggtacaagcaagaagtttacgccgttcggcggtggcaccaggctctgccctggatcagagctcgccaaagtagaggctgctttcttcctccatcaccttgtgctcaatttcagcatggagtatccaataagtatggcatgcaagttgagtggtaccaaatctggtccatagatatctgcagttatcagattgtgacagaagaaaatgcacctccatctttcttcagactagcgagatagtaagtgcttgctgaatctttatagttactgatcatggtataacttggcaccctgcagatggaaaatcgatggcgatgacattccaatggcatacccgtacgtggagttcccgagaggcctgccgatagaaatcgagccgatttgctctgaatcttgactgggttcttgcagctgcagacatggtggtgggtgaaaaaagagattgcaagcaatgaagaagcaccgatgactagcttagcttagctagttgctggaatggggtagctgaggaggttatgatctcctctgtacatggtgtacatatattttatccattgtgattacttgaggtggttgggtcaccctgttacatcctccactgtctggactactatcctatagaaaaaaaaatgggctcctggtgtttacatttacttctgaaattcagtatggggagatatgtatgaaccagacctcactgaaactt

SEQ ID NO: 316 - DNA, 1395 bp, synthetic construct
  source 1..1395: mol_type = other DNA; note = Dwarf11-B coding sequence - TraesCS2B02G350400.1
atgagcatgatggtgggggtgggcgatcttgtgctggctgctccggcgatcctgctcgccttgctcctgactctggtgctgagccacttcctgcctttgctcctcaaccccaaggctccaagaggcagctttggatggccccttgttggagagaccctcaggttcctcacccctcacgcctccaacacgctgggtagcttcctggaggatcactgctccaggtatgggagggtgttcaagtcccatctgttctgcacccccaccgtagtgtcctgtgaccaggagctgaaccacttcatcctgcagaatgaggagaggctgttccagtgcagctaccccaggccaattcatggcatactgggcaagtcctccatgctggtggtcctgggggaggaccacaagcggctcaggaaccttgctctggccctggtcacctccacaaagctcaagccaagctaccttggcgacattgagaagattgcgctgcacatagtcggatcatggcatggcaagggcggcaacatcaccttctgcgaggaggcaagaaagtttgcattcagtgtgatagtgaagcaggtgctggcgctgtcaccagaggagcctgtcactgccatgatactggaggacttcctcaccttcatgaagggcctcatctctttccctctccgcatcccagggaccccatacgccaaagctgtccaggccagagagaggatatcaagcactgtgaagggcatcattgaggagaggaggaaggctgactgctgcaagaaggatgatttcctcaacgtgctcctgtcaaccgatgagctctctgacgaggagaaagtgagttttgtgctggactccctgctaggggggtatgagaccacctcactcatgatatccatggtcgtctacttccttgggcagtcagctcaagatctagacctggtgaagagggagcatcaaggcataagatctaccaaagcaaaggaggagtgcttgagctctgaggactacaagaagatggaatatacccaacatgttatcaatgaggcgctgagatgtggaaacattgtcaagtttgtccacaggaaggccctcaaagatgtcagatacaaagagtatctgattccatctggctggaaggtcctacctgtttttagtgctgttcatttgaacccctcacttcatggaaatgcccaacagtttcagccttgcagatgggagggcccaagccaaggtacaagcaagaagtttacgccgttcggcggtggcaccaggctctgccctggatcagagctcgccaaagtagaggctgctttcttcctccatcaccttgtgctcaatttcagcatggagtatccaataagtatggcatgcaagttgagtggtaccaaatctggtccatag

SEQ ID NO: 317 - protein, 464 aa, synthetic construct
  source 1..464: note = Dwarf11-B protein sequence - TraesCS2B02G350400.1
MSMMVGVGDLVLAAPAILLALLLTLVLSHFLPLLLNPKAPRGSFGWPLVGETLRFLTPHASNTLGSFLEDHCSRYGRVFKSHLFCTPTVVSCDQELNHFILQNEERLFQCSYPRPIHGILGKSSMLVVLGEDHKRLRNLALALVTSTKLKPSYLGDIEKIALHIVGSWHGKGGNITFCEEARKFAFSVIVKQVLALSPEEPVTAMILEDFLTFMKGLISFPLRIPGTPYAKAVQARERISSTVKGIIEERRKADCCKKDDFLNVLLSTDELSDEEKVSFVLDSLLGGYETTSLMISMVVYFLGQSAQDLDLVKREHQGIRSTKAKEECLSSEDYKKMEYTQHVINEALRCGNIVKFVHRKALKDVRYKEYLIPSGWKVLPVFSAVHLNPSLHGNAQQFQPCRWEGPSQGTSKKFTPFGGGTRLCPGSELAKVEAAFFLHHLVLNFSMEYPISMACKLSGTKSGP

SEQ ID NO: 318 - DNA, 5344 bp, Triticum aestivum
  source 1..5344: mol_type = genomic DNA; note = Dwarf11-B genomic sequence - IWGSC:2B:497794914:497800257:1
cagggcaaggacatgataataagaacactgctcaaacgagttagccagaaaattagaatttcacacaatcaaactaatcaagcacagtactatacagcctgctgtgaccaaaactggcactcgatttagttttcagattaccacaagttattatttcagacgcaaggtgcagaccttcacagctcagcaccaaagtcctatgcgtgcatgtaacccgattcatttctctctgtctctctacctgcgtgtttgactacaccttgagcagcagcagcagcagcagcagcagcctagatgctagtagtactgcaaagggaccatactcctagctagactcagccccttgctgataaaagtcattcatacagttcaaatagtatgagtatacatataagtacatgcagccgggtctgcagtaaaaacagagatcaagcaagtagtaaaatatatactgctagtggtgtttttgagtactaattaaaaaaggccaaagcaagaaaacaaaaggcaaccttatttttcctttccctcccgctttgcaaagatccttcctgcccttgctcccactactatatagcctccccctcaccttccattccagagagagagagaagcagagggcgagcaagtgaatgatagctagacagacagacagacagagaggcaaggcatggcaggctccatgcagcttgtgagatgtaactaggtagggtggggcggtggcggtggtggtgtgtggtatgagcatgatggtgggggtgggcgatcttgtgctggctgctccggcgatcctgctcgccttgctcctgactctggtgctgagccacttcctgcctttgctcctcaaccccaaggctccaagaggcagctttggatggccccttgttggagagaccctcaggttcctcacccctcacgcctccaacacgctgggtagcttcctggaggatcactgctccaggtatttttatttcttcttcttttttgttatcattcaccacagccacacctcaagatttctccacaatgcaaccaagcacgtagtattgtttatcatttactcatgtggcagcaaaagatgatgcatgtcgtgcatgttgtcctgactcagcacctttatctttgtgtcttggctccgaggctgtgatatatttgaatttctacaggttttgtgtacagaacttatttctgaaaagtttcacctattgttttatgggggtgaaaagatggaaagatctcataagaccctctaacaaatgatggcaacttaataacataagaaaagattaacattgtaattgatgtgattgtgcaggtatgggagggtgttcaagtcccatctgttctgcacccccaccgtagtgtcctgtgaccaggagctgaaccacttcatcctgcagaatgaggagaggctgttccagtgcagctaccccaggccaattcatggcatactgggcaagtcctccatgctggtggtcctgggggaggaccacaagcggctcaggaaccttgctctggccctggtcacctccacaaagctcaagccaagctaccttggcgacattgagaagattgcgctgcacatagtcggatcatggcatggcaagggcggcaacatcaccttctgcgaggaggcaagaaaggttggtcacccggtgcatgcactaaccacacccaaagctggctagacatgcatcagtagggacatgatcccgtgaaacatggaggaaaaactctgcacatgttgcctatagctacatcatcatgctgttatttgctgatgcatggatatttttcagacgctggctttgacttaccagggtcattcttctcctttttttgactctttttttctgacccttttttctttcctttggcacagtttgcattcagtgtgatagtgaagcaggtgctggcgctgtcaccagaggagcctgtcactgccatgatactggaggacttcctcaccttcatgaagggcctcatctctttccctctccgcatcccagggaccccatacgccaaagctgtccaggtaactaagtaaacaactctggtataccaccttcttaagctgtcaaagtttccagcacttcttatctacttcaccatgcatcaggctcatgaaactctggtatatattgttctaacaccgaggttcttggctatgttgatcactcctcacaggccagagagaggatatcaagcactgtgaagggcatcattgaggagaggaggaaggctgactgctgcaagaaggatgatttcctcaacgtgctcctgtcaaccgatgagctctctgacgaggagaaagtgagttttgtgctggactccctgctaggggggtatgagaccacctcactcatgatatccatggtcgtctacttccttgggcagtcagctcaagatctagacctggtgaaggtacatacatacctgatcaagcttaagccacaggtgattggtggttgtgtgcatgtcacttattatatatgaacatgctgtgcatgcagagggagcatcaaggcataagatctaccaaagcaaaggaggagtgcttgagctctgaggactacaagaagatggaatatacccaacatgtaagtaagatgatgatcattcagtacacgctttaggatatgtagccggttggtaagcatggatcctttttctttctattatcagccatctgcacaaatatgtgaccctccaaaactgatgttttttttttctgtccatatgcctgcctatatctggaattttgactagagcaaacaacactttgcaagaacagtgcagatggggaagggtctcttaatttgttctgtagtaattggaatggttcaatgatacaaacatgcgtggatgtcctttcaggttatcaatgaggcgctgagatgtggaaacattgtcaagtttgtccacaggaaggccctcaaagatgtcagatacaaaggtaattaaccctgctagtacttggggctttcccagcagatcccattgtgctcatcacatgataatggatcaggcaaagggggcggttgggcctttattgctgatttgtgagcattgttattcctaaacacctagcttttgatagaagatgctcaaaagcaagtggacctcttcttttgctctgttgcagagtatctgattccatctggctggaaggtcctacctgtttttagtgctgttcatttgaacccctcacttcatggaaatgcccaacagtttcagccttgcagatgggaggtatgtctgattttcataccatgtgcatgggcatctatatttgtggtgaagtaatgaatacagcttagtttatgcagattagctttaacataatatgcttgtttagggaagcttaactttgacataatatgcttttttatataaaaaattatatgatgaaaaaggttatagaacaaatcagaagtgcttatctgtagctttgagagaatcttctttaaggttgctctgttaactaattgatgcctttaattagtgagtgtccaactaacccatgccataataattacttgcaactatcctggtatcttcagatgccaagcagcctttggctgagggcctagtgccttctgtacatggtcctaaccatgattcctcactgaaagccagcatccttggctttgcttcttcattttcttaactcccttgatgaagcaagctcatatgcatgacttgtataattgattgatgtaacagggcccaagccaaggtacaagcaagaagtttacgccgttcggcggtggcaccaggctctgccctggatcagagctcgccaaagtagaggctgctttcttcctccatcaccttgtgctcaatttcaggtaaaacatttctcctagccgattaagagatacacatgtaacaactagcgcagcaagagcaacaaatcggagaaacgaagaacataaatattttttgtaaggataaatcaacttaagaatgaaattaaccagaggaaatatgaatagcatgaccacagattgatgcagttatcagtctcatactaatggagatactgtgcaaacatggcagcatggagtatccaataagtatggcatgcaagttgagtggtaccaaatctggtccatagatatctgcagttatcagattgtgacagaagaaaatgcacctccatctttcttcagactagcgagatagtaagtgcttgctgaatctttatagttactgatcatggtataacttggcaccctgcagatggaaaatcgatggcgatgacattccaatggcatacccgtacgtggagttcccgagaggcctgccgatagaaatcgagccgatttgctctgaatcttgactgggttcttgcagctgcagacatggtggtgggtgaaaaaagagattgcaagcaatgaagaagcaccgatgactagcttagcttagctagttgctggaatggggtagctgaggaggttatgatctcctctgtacatggtgtacatatattttatccattgtgattacttgaggtggttgggtcaccctgttacatcctccactgtctggactactatcctatagaaaaaaaaatgggctcctggtgtttacatttacttctgaaattcagtatggggagatatgtatgaaccagacctcactgaaacttcgaaacaacgttcctattcttaccaaatagaccatgtatgagggaacattgacataagcacgccagtgaacagagagtgaagttattgcctaaaactggcattaacctttagtgatactaacatgaatccttcagaattcatgtaaattcgtgtggggagattctactatgatcagttatagagagattctatgagggacttttggagataacggataagtccttcagaattcagttgaaattcccatgctcaactggagaatgacaggagagaggagaccaatgatcagaggctttgttcaggagtatagagaatgatatgcaaaaaagacagaaaattgtggcccatacaggtctcgaacctgtgaccttcgcgttattagcacgacgctctaaccagctgagctaataggccttgtgtgaagttcgatcgagtaaatcgattatgtatgacataggtttttttttttgcgggttttttttctttgcgggggacatacgttttttctaagtaccccaatcagtcaaagcgtatgccctctgttattttttccagttccaaatcagtcagggcgtatgttggaataaatatgacgtactggcagacaacaataggctcgtccctaatgacttgcaatgctaaatgtcatactatcaaagatagacaatgctttagtgacatgaagtcag

SEQ ID NO: 319 - DNA, 1897 bp, synthetic construct
  source 1..1897: mol_type = other DNA; note = Dwarf11-D cDNA sequence - TraesCS2D02G331100.1
gagagaagcagagggcgagcaagtgaatgatagctagacagagagacagagaggcaaggcatggcaggctccatgcagcttgtgagatgtaacttctagggtggggcggtggtggtggtgtgtgctagtatgagcatgatggtgggggtgggcgatcttgtgctggctgctccggcgatcctgctcgccttgctcctgactctggtgctgagccacttcctgcctttgctcctcaaccccaaggctccgaggggcagctttggatggccccttgttggcgagaccctcaggttcctcacccctcacgcctccaacacgctgggtagcttcctggaggatcactgctccaggtacgggagggtgttcaagtcccatctgttctgcacccccaccgtagtgtcctgtgaccaggagctgaaccacttcatcctgcagaatgaggagaggctgttccagtgcagctaccccaggccaattcatggcatactgggcaagtcctccatgctggtggtcctgggggaggaccacaagcggctcaggaaccttgctctggccctggtcacctccacgaagctcaagccaagctaccttggcgacattgagaggattgcgctgcacatagtcggatcatggcatggcaagggcggcaacatcaccttctgcgaggaggcaagaaagtttgcattcagtgtgatagtgaagcaggtgctggggctgtcaccggaggagcctgtcactgccatgatactggaggacttcctcaccttcatgaagggcctcatctctttccctctccgcatcccagggaccccatacgccaaagctgtccaggccagagagaggatatcaagcactgtgaagggcattatcgaggagaggaggaaggctgactgctgcaagagggatgatttcctcaacgtgctcctgtcaaccgatgaactctctgacgaggagaaagttagttttgtgctggactccctgctaggaggatatgagaccacctcactcatgatctccatggtcgtctacttccttgggcagtcagctcaagatctggacctggtgaagagggagcatcaaggcataagatctaccaaagcaaaggaggagtgcttgagctccgaggactacaagaagatggaatatacccaacatgttatcaatgaggcgctgagatgtggaaacattgtcaagtttgtccacaggaaggccctcaaagatgtcagatacaaagagtatctgattccatctggctggaaggtcctacctgttttcagtgctgttcatttgaacccctcgcttcatggaaatgcccaacagtttcagccttgcagatgggagggcccaagccaaggtacaagcaagaagtttacgccgttcggcggtggcaccaggctctgccctggatcagagcttgccaaagtagaggctgctttcttcctccatcaccttgtgctcaatttcagatggaaaatcgatggcgatgacattccaatggcatacccgtacgtggagttcccgagaggcctgccgatcgaaatcgagccgatttgctctgaatcttgactgggttcttgcagctgcagacatggtggtgagtgaaaaaagagattgcaagcaatgaagaagcaccgatgactagcttagcttagctagttgctggaatggggtagctgaggaggttgtgatctcctctgtacatggtgtacatatattttgtccattgtgattactcgaggtggttgggtcaccctgttacatcctccactgtctggactattatcctatagaaaaaaatgggctcctggtgtttacatttacttctgaaattcagtatggggagatatgtatgaaccggacctcactgaaacttcgaaacaacgttcctattcttacc

SEQ ID NO: 320 - DNA, 1437 bp, synthetic construct
  source 1..1437: mol_type = other DNA; note = Dwarf11-D coding sequence - TraesCS2D02G331100.1
atgagcatgatggtgggggtgggcgatcttgtgctggctgctccggcgatcctgctcgccttgctcctgactctggtgctgagccacttcctgcctttgctcctcaaccccaaggctccgaggggcagctttggatggccccttgttggcgagaccctcaggttcctcacccctcacgcctccaacacgctgggtagcttcctggaggatcactgctccaggtacgggagggtgttcaagtcccatctgttctgcacccccaccgtagtgtcctgtgaccaggagctgaaccacttcatcctgcagaatgaggagaggctgttccagtgcagctaccccaggccaattcatggcatactgggcaagtcctccatgctggtggtcctgggggaggaccacaagcggctcaggaaccttgctctggccctggtcacctccacgaagctcaagccaagctaccttggcgacattgagaggattgcgctgcacatagtcggatcatggcatggcaagggcggcaacatcaccttctgcgaggaggcaagaaagtttgcattcagtgtgatagtgaagcaggtgctggggctgtcaccggaggagcctgtcactgccatgatactggaggacttcctcaccttcatgaagggcctcatctctttccctctccgcatcccagggaccccatacgccaaagctgtccaggccagagagaggatatcaagcactgtgaagggcattatcgaggagaggaggaaggctgactgctgcaagagggatgatttcctcaacgtgctcctgtcaaccgatgaactctctgacgaggagaaagttagttttgtgctggactccctgctaggaggatatgagaccacctcactcatgatctccatggtcgtctacttccttgggcagtcagctcaagatctggacctggtgaagagggagcatcaaggcataagatctaccaaagcaaaggaggagtgcttgagctccgaggactacaagaagatggaatatacccaacatgttatcaatgaggcgctgagatgtggaaacattgtcaagtttgtccacaggaaggccctcaaagatgtcagatacaaagagtatctgattccatctggctggaaggtcctacctgttttcagtgctgttcatttgaacccctcgcttcatggaaatgcccaacagtttcagccttgcagatgggagggcccaagccaaggtacaagcaagaagtttacgccgttcggcggtggcaccaggctctgccctggatcagagcttgccaaagtagaggctgctttcttcctccatcaccttgtgctcaatttcagatggaaaatcgatggcgatgacattccaatggcatacccgtacgtggagttcccgagaggcctgccgatcgaaatcgagccgatttgctctgaatcttga

SEQ ID NO: 321 - protein, 478 aa, synthetic construct
  source 1..478: note = Dwarf11-D protein sequence - TraesCS2D02G331100.1
MSMMVGVGDLVLAAPAILLALLLTLVLSHFLPLLLNPKAPRGSFGWPLVGETLRFLTPHASNTLGSFLEDHCSRYGRVFKSHLFCTPTVVSCDQELNHFILQNEERLFQCSYPRPIHGILGKSSMLVVLGEDHKRLRNLALALVTSTKLKPSYLGDIERIALHIVGSWHGKGGNITFCEEARKFAFSVIVKQVLGLSPEEPVTAMILEDFLTFMKGLISFPLRIPGTPYAKAVQARERISSTVKGIIEERRKADCCKRDDFLNVLLSTDELSDEEKVSFVLDSLLGGYETTSLMISMVVYFLGQSAQDLDLVKREHQGIRSTKAKEECLSSEDYKKMEYTQHVINEALRCGNIVKFVHRKALKDVRYKEYLIPSGWKVLPVFSAVHLNPSLHGNAQQFQPCRWEGPSQGTSKKFTPFGGGTRLCPGSELAKVEAAFFLHHLVLNFRWKIDGDDIPMAYPYVEFPRGLPIEIEPICSES

SEQ ID NO: 322 - DNA, 5287 bp, Triticum aestivum
  source 1..5287: mol_type = genomic DNA; note = Dwarf11-D genomic sequence - IWGSC:2D:423852701:423857987:1
aaggctgttctgcgtgggaaaacagggcaaggacatgataataagaacactgctaaaacgagttaccatcgccagaaagatagaatttcacacaatcaaactaatcaagcaaagtactatacgacctgttgtgaccaaaactggcactcgatttagttttcagattagcacaaacacaaggtgcagaccttcacagctccgcaccaaagtcctatgcgtgcatgtaacccgatacaatttctctctctacctgcgtgtttgactgcaccttgagcagcagcagcagcctagatgctagcagtactgcaaagggaccatactcctagctagacccagccccttgctgataaaagttattcatacagttcaaatagcatgagtatacatataagtacatgcagccgggtctgcagtaaaaacagagatcaagcaagtagtaaaatatataccggtggtgttttttgagtactaattaaaaaaaggccaaagcaagaaaacaaaaggcaaccttatttttcctttccctcccgctttgcagagatccttcctgcccttgctcccactactatatagcctccccctcaccttccattccagagagagagaagcagagggcgagcaagtgaatgatagctagacagagagacagagaggcaaggcatggcaggctccatgcagcttgtgagatgtaacttctagggtggggcggtggtggtggtgtgtgctagtatgagcatgatggtgggggtgggcgatcttgtgctggctgctccggcgatcctgctcgccttgctcctgactctggtgctgagccacttcctgcctttgctcctcaaccccaaggctccgaggggcagctttggatggccccttgttggcgagaccctcaggttcctcacccctcacgcctccaacacgctgggtagcttcctggaggatcactgctccaggtatttttcttttcttcatcttttttgctatcattcaccacagccacacctcaagatttctcaacgatgcaatcaagcacgtagtattgtttatcatttactcatgtggcagcaaaagatgatgcatgtcgtgcatgttgtcctgactcagcacctttatctttgtgtcttggctccgaggctgtgatatatttgaatttctacaggttttgttcacagaacctatttctgaaaagtttaacctgttgtttcgtgggggagaaaagatggaaagatctcataaggccctctagcaaatgatggcaacttaacaacatatgaaaagattaacattgttgttgatgtgatgatgcaggtacgggagggtgttcaagtcccatctgttctgcacccccaccgtagtgtcctgtgaccaggagctgaaccacttcatcctgcagaatgaggagaggctgttccagtgcagctaccccaggccaattcatggcatactgggcaagtcctccatgctggtggtcctgggggaggaccacaagcggctcaggaaccttgctctggccctggtcacctccacgaagctcaagccaagctaccttggcgacattgagaggattgcgctgcacatagtcggatcatggcatggcaagggcggcaacatcaccttctgcgaggaggcaagaaaggttggtcgccccgtgcatgcactaactacaaccaaagctagctagacatgcatcagtggggacatgatcccgtgaaacttggaggaaaaactctgcacatgttgcctatggctacatcatcatgctgttacttgctgatgcatcatcagattttttttcaaacgctggctttgacttaccagggtcattcttctccgtattttgactctctttttctgactctttttttttcctttggcacagtttgcattcagtgtgatagtgaagcaggtgctggggctgtcaccggaggagcctgtcactgccatgatactggaggacttcctcaccttcatgaagggcctcatctctttccctctccgcatcccagggaccccatacgccaaagctgtccaggtaattcagtaaacaactctggtattttttatgtacttcaccatgcatcaagctcatgaaactctggtatacccatttgtaccaagcttacattgaagatacgtatgtgtatatagattgttctaacagtgaggttcttgggtatgttgatcactcctctcaggccagagagaggatatcaagcactgtgaagggcattatcgaggagaggaggaaggctgactgctgcaagagggatgatttcctcaacgtgctcctgtcaaccgatgaactctctgacgaggagaaagttagttttgtgctggactccctgctaggaggatatgagaccacctcactcatgatctccatggtcgtctacttccttgggcagtcagctcaagatctggacctggtgaaggtacataccatacctgatcaagcttaagccacaggtgattggtggttgtgtgcatgtcacttattatatatgaacatgctgtgcatgcagagggagcatcaaggcataagatctaccaaagcaaaggaggagtgcttgagctccgaggactacaagaagatggaatatacccaacatgtaagtaagatgatgatcattcagtacacgctttaggacatgtagccggttggtaagcagggatcctttttctttctattatcagccattcgcacaaatatgtgaccctccaaaactgatgggagttttttttctgtccatatgcctgcctatatctggaattttgactagagcaaacaacactttgcaagaacagtgcagatggggaagggtctcttaatatgttctgtaataattggaatggttcaatgatacatacatacatgcgtggatgtcctttcaggttatcaatgaggcgctgagatgtggaaacattgtcaagtttgtccacaggaaggccctcaaagatgtcagatacaaaggtaattaaccctgctagtatttgaggctttcctagcagatcccattgtgctcatcacatgataatggatcaggcaaagggggcggttgggcctttattgctgatttgtgagcattgttattcctaaacacctagcttttgatagaagatgctcaaaagcaagtggacctcttcttttgctctgttgcagagtatctgattccatctggctggaaggtcctacctgttttcagtgctgttcatttgaacccctcgcttcatggaaatgcccaacagtttcagccttgcagatgggaggtatgtctgatttccataccatgtgcacgggcatctatatttgtagtcaagtaatgaatacaacttagtttatgcagattagctttaacataatatgcttgtttagggaagcctaactttgacataatatgcttttttgttaaactattttatacaatgaaaaggtgagaacaaatcagaagagcttatctgtagctttgagagaatcttctttaaggttgctctgttaactaattgatgcctttaattagtgagcgtccaactaacccatgccataataattacttgcaactatcctggtatcttcagatgccaagcaggctttggctgagggcctagtgccttctgtacatggtcctaaccatgattcctccctcaaagccagcatccttggctttgcttcttcattttattaactcccttgatgaagctagctcatatgcatgacttgtacaattgattgatgcaacagggcccaagccaaggtacaagcaagaagtttacgccgttcggcggtggcaccaggctctgccctggatcagagcttgccaaagtagaggctgctttcttcctccatcaccttgtgctcaatttcaggtaaaagatttgtcctagcctattaagagatacacaggtaactactgacgcagcaagagccacaaatcagagaaacgaagaacctaaatattttgcaaggataaatcaacttaagaatgaaactaaccagaggaaatatgaatagcatgaccacaggctgatgcagttatcagtctcatactactaattaagatgctgtgcaaacatggcagcatggagtatccaataagtatggcatgcaagttgagtggtactaaatctggtccatagatatctgcagttatcagattgtgacagaagaaaatgcatctccctctactttttttcagagtaaggagataagtgcttactgaatctctatagttactgatcatagtataatttggtgcctgcagatggaaaatcgatggcgatgacattccaatggcatacccgtacgtggagttcccgagaggcctgccgatcgaaatcgagccgatttgctctgaatcttgactgggttcttgcagctgcagacatggtggtgagtgaaaaaagagattgcaagcaatgaagaagcaccgatgactagcttagcttagctagttgctggaatggggtagctgaggaggttgtgatctcctctgtacatggtgtacatatattttgtccattgtgattactcgaggtggttgggtcaccctgttacatcctccactgtctggactattatcctatagaaaaaaatgggctcctggtgtttacatttacttctgaaattcagtatggggagatatgtatgaaccggacctcactgaaacttcgaaacaacgttcctattcttaccaaatagatagaccatgtataagggaacattgacataagcacgccagtgaacagagagtgaagttactgtctaaaactggcattaaccttcagtgatacaaacatgaatcctttagaattcatgtaaactaagtatggggagattcagagggacgtttggacttttggagagaacgaataagtccttcagaattcttgaaattcccatgctcaaatggagaatgagaggagatcaatgatcagagaatgatatgcagaaaaatagaccatgtttttttttagaaaggaggatgacccccggcctctgcatctgggagatgcatgcggccattttattgattattctcgaggaccttacaaagtagaacaacaatatgcctgaatccgccatcttggcaacatctgccgctactcctatacaaatgatgaaggggtgcaagttaggccacatacccagacctctcacctaagcctaacatctaaagccggaggcccggaccgagccatctgccgggtccggggctcaaaccggtccgacgcactcacatgtgtcgttgccgtcatcttccactggtccatcttcagagcagattgaggtgac

SEQ ID NO: 323 - DNA, 1450 bp, synthetic construct
  source 1..1450: mol_type = other DNA; note = Myb80-A cDNA sequence - TraesCS2A02G331200.1
cgccgatcgaaaactcagtcgctcgaacactcacccagcaagaacgcagcgccagcgacgtatcggcctaccggaaagcggagcctccacgacggatcccgtgcgcgcgcagggcggtccgggaggcggaggcgccgacatgggccggatcccgtgctgcgagaaggacaacgtgaagcgcgggcagtggacgcccgaggaggacaacaagctgctctcctacatcacgcagcacggcacgcgcaactggcgcctcatccccaagaacgccgggctgcagcgatgcgggaagagctgccggctgcggtggaccaactacctgcggcccgacctcaagcacggcgagttcaccgacgccgaggagcagaccatcatcaagctgcactccgtcgtcggcaacaggtggtcggtgatcgcggcccagctgccggggcggacggacaacgacgtcaagaaccactggaacaccaagctcaagaagaagctgtccgggatgggcatcgaccccgtcacgcacaagtccttctcgcacctcatggccgagatcgccaccacgctcgccccgccgcaggtggcgcacctcgccgaggccgccctggggtgcttcaaggacgagatgctccacctcctcaccaagaagcgccccaccgacttcccctcgcccgccatgcccgacacggcggcgggcgccagcgcgggcatggccatgggcccgggcgcgcacatcgcgccctgctacgccgcgccgccacaagccgacgacaccatcgagcgcatcaagatgggcctgtcccgcgccatcatgagcgagcccgccgctcccgcagccgacaagccgtggccgtcgggcgacatgtccgaggggctggccggcatgtacgccgcgttcaaccccgcgcaggcggcggagttccggtacgaagggacggcgtcggggtacgtccttgggggcgacggcgaccagggcacgtcgatgtggagccaccacagcatgtacagcgggagctccggcactgaggggggcaggccggcattgcaggaaaagggcaacgacagcgtcggcagcagcggcggcgacgaggaggcggaagatggcaaggagggagggaagggagcctccgacatgtcggggctgtttggatcagattgcgtgctctgggacttgcccgacgagctgacgaatcacatgtgtggctgaattcacacggcgagcttagctagcatcatcgatgaacgtcagttcgccggagaaaagaaagcctagagccaaacgattctagaagcacataaatttctgacggtgcctgagaagagttagaataaacagggaaactggaaaatggcatacgttcttttttttctgcgtgcagaactgttaagtgtacattgctctgccgctggccatgctattttttgggggtcctgtctactgtgcttcagtcaaaacgac

SEQ ID NO: 324 - DNA, 1059 bp, synthetic construct
  source 1..1059: mol_type = other DNA; note = Myb80-A coding sequence - TraesCS2A02G331200.1
atgggccggatcccgtgctgcgagaaggacaacgtgaagcgcgggcagtggacgcccgaggaggacaacaagctgctctcctacatcacgcagcacggcacgcgcaactggcgcctcatccccaagaacgccgggctgcagcgatgcgggaagagctgccggctgcggtggaccaactacctgcggcccgacctcaagcacggcgagttcaccgacgccgaggagcagaccatcatcaagctgcactccgtcgtcggcaacaggtggtcggtgatcgcggcccagctgccggggcggacggacaacgacgtcaagaaccactggaacaccaagctcaagaagaagctgtccgggatgggcatcgaccccgtcacgcacaagtccttctcgcacctcatggccgagatcgccaccacgctcgccccgccgcaggtggcgcacctcgccgaggccgccctggggtgcttcaaggacgagatgctccacctcctcaccaagaagcgccccaccgacttcccctcgcccgccatgcccgacacggcggcgggcgccagcgcgggcatggccatgggcccgggcgcgcacatcgcgccctgctacgccgcgccgccacaagccgacgacaccatcgagcgcatcaagatgggcctgtcccgcgccatcatgagcgagcccgccgctcccgcagccgacaagccgtggccgtcgggcgacatgtccgaggggctggccggcatgtacgccgcgttcaaccccgcgcaggcggcggagttccggtacgaagggacggcgtcggggtacgtccttgggggcgacggcgaccagggcacgtcgatgtggagccaccacagcatgtacagcgggagctccggcactgaggggggcaggccggcattgcaggaaaagggcaacgacagcgtcggcagcagcggcggcgacgaggaggcggaagatggcaaggagggagggaagggagcctccgacatgtcggggctgtttggatcagattgcgtgctctgggacttgcccgacgagctgacgaatcacatgtgtggctga

SEQ ID NO: 325 - protein, 352 aa, synthetic construct
  source 1..352: note = Myb80-A protein sequence - TraesCS2A02G331200.1
MGRIPCCEKDNVKRGQWTPEEDNKLLSYITQHGTRNWRLIPKNAGLQRCGKSCRLRWTNYLRPDLKHGEFTDAEEQTIIKLHSVVGNRWSVIAAQLPGRTDNDVKNHWNTKLKKKLSGMGIDPVTHKSFSHLMAEIATTLAPPQVAHLAEAALGCFKDEMLHLLTKKRPTDFPSPAMPDTAAGASAGMAMGPGAHIAPCYAAPPQADDTIERIKMGLSRAIMSEPAAPAADKPWPSGDMSEGLAGMYAAFNPAQAAEFRYEGTASGYVLGGDGDQGTSMWSHHSMYSGSSGTEGGRPALQEKGNDSVGSSGGDEEAEDGKEGGKGASDMSGLFGSDCVLWDLPDELTNHMCG

SEQ ID NO: 326 - DNA, 2842 bp, Triticum aestivum
  source 1..2842: mol_type = genomic DNA; note = Myb80-A genomic sequence - IWGSC:2A:564217648:564220489:1
agtggattcgccctcggaaacctcaaacgatttgtcgtattgacagtagcattctccgagcaaatagaatgtagcactagattaaccttggaaatatgacttgctcatgtcactgctaattagacgatccattcacctctcaaagtattttttggagagaaacatccggagtctctctgaatgaatgaccgtagcgctgcccttgactcaaatgggcacgggtaagtacaactctatgcacgcacgcactcggcacaggacttcgcactgtcagaaagtacatctcagcccgtcgacgccgcggcgcgcaccggatcgaccggagtggagcatcgacgacgacgagctggcgaaaacgcgacggacaccgtgcttgcttggactgggggttgacccggcgctgcgcgggtgggcaacctgtcccgtcccccggggcgctcacgctttgggcggcgttgaattctttatcccgcccatgcctccttcgcccagcgccccgccccgccccgcccttcccgtgccgccggccgcacgcccgcacgaccgcgcgccccgcacctatatatacttcccagcgcgccggcagatgcaagcgccgcacgccgatcgaaaactcagtcgctcgaacactcacccagcaagaacgcagcgccagcgacgtatcggcctaccggaaagcggagcctccacgacggatcccgtgcgcgcgcagggcggtccgggaggcggaggcgccgacatgggccggatcccgtgctgcgagaaggacaacgtgaagcgcgggcagtggacgcccgaggaggacaacaagctgctctcctacatcacgcagcacggcacgcgcaactggcgcctcatccccaagaacgccggtgagtccccggcgccagcagacgctctggttaagtggaaggaacgtgttacgttagctgttgtcgctggcgctgaacgaggttcccgcgcgtgacagggctgcagcgatgcgggaagagctgccggctgcggtggaccaactacctgcggcccgacctcaagcacggcgagttcaccgacgccgaggagcagaccatcatcaagctgcactccgtcgtcggcaacaggtgccccaggatcatccacgccgtctcgttctcgtctgagctggctgcatctctatgccgttttgctgatcgatgcgttggcgttggcgtgcaggtggtcggtgatcgcggcccagctgccggggcggacggacaacgacgtcaagaaccactggaacaccaagctcaagaagaagctgtccgggatgggcatcgaccccgtcacgcacaagtccttctcgcacctcatggccgagatcgccaccacgctcgccccgccgcaggtggcgcacctcgccgaggccgccctggggtgcttcaaggacgagatgctccacctcctcaccaagaagcgccccaccgacttcccctcgcccgccatgcccgacacggcggcgggcgccagcgcgggcatggccatgggcccgggcgcgcacatcgcgccctgctacgccgcgccgccacaagccgacgacaccatcgagcgcatcaagatgggcctgtcccgcgccatcatgagcgagcccgccgctcccgcagccgacaagccgtggccgtcgggcgacatgtccgaggggctggccggcatgtacgccgcgttcaaccccgcgcaggcggcggagttccggtacgaagggacggcgtcggggtacgtccttgggggcgacggcgaccagggcacgtcgatgtggagccaccacagcatgtacagcgggagctccggcactgaggggggcaggccggcattgcaggaaaagggcaacgacagcgtcggcagcagcggcggcgacgaggaggcggaagatggcaaggagggagggaagggagcctccgacatgtcggggctgtttggatcagattgcgtgctctgggacttgcccgacgagctgacgaatcacatgtgtggctgaattcacacggcgagcttagctagcatcatcgatgaacgtcagttcgccggagaaaagaaagcctagagccaaacgattctagaagcacataaatttctgacggtgcctgagaagagttagaataaacagggaaactggaaaatggcatacgttcttttttttctgcgtgcagaactgttaagtgtacattgctctgccgctggccatgctattttttgggggtcctgtctactgtgcttcagtcaaaacgacttcaattcaaacagatttggtagcatgtcaatgaagctgtctgaccgtaacatgtcaatgttttagtaaaaccatacaacttttcttgaaatgaacatgacgcactgtaattcaaatacttagggcttgttcggagtccctcccgcttcgtgactctgttcccggagcagccggagccgcggtttagatttattgagcgaggaaacaggtactccgcggatccttggatctgacggagccggaggtttcccgaacagctccttatttgttggtacatttctttttaagatctgctgggcaccaatccgtgctacacttttagggcttctttgagttgcttgattctaaaaatgtagaaataaaaaaacatagaaataggatatgaatgcatgcacaaaacaaatgattggtaaacagggagattgttaagacctgacggtttctattgactgaattgggggaacccttttttgcttagaaaacatggaagtttgcctttttcctggggaaattttgtcaaccgggtgaatgattcaaaggaactaaaaacacaagaatgctaataaacatggtcaaattaaagtcaaaccatacaaaaaa

SEQ ID NO: 327 - DNA, 1422 bp, synthetic construct
  source 1..1422: mol_type = other DNA; note = Myb80-B cDNA sequence - TraesCS2B02G351000.1
gcggatgcaagcgccgcacgccgatcgaaaattcagacgctcacacactcactcgcaagaacgcagcgccggcgacgtaccggcctaccggaaagcggaatctccacgacggatcccgcgcgcgagcagggcggcctcggaggcggacgcgccgacatgggccggatcccgtgctgcgagaaggacaacgtgaagcgcgggcagtggacgcccgaggaggacaacaagctgctctcctacatcacgcagcacggcacgcgcaactggcgcctcatccccaagaacgccgggctgcagcgctgcgggaagagttgccggctgcggtggaccaactacctgcggcccgacctcaagcacggcgagttcactgacgccgaggagcagaccatcatcaagctgcactccgtcgtcggcaacaggtggtcggtgatcgcggcccagctgccggggcggacggacaacgacgtcaagaaccactggaacaccaagctcaagaagaagctgtccgggatgggcatcgaccccgtcacgcacaagtctttctcgcacctcatggccgagatcgccaccacgctcgccccgccgcaggtggcgcacctcgccgaggccgccctggggtgcttcaaggacgagatgctccacctcctcaccaagaagcgccccaccgacttcccctcgcccgccatacccgacatggcggcgggcgccagcgggggcatggccatgggctcgggcgcgctcatcacgccctgcttcaacgcgccgccacaagccgacgacaccatcgagcgcatcaagatgggcctgtcccgcgccatcatgagcgagcccgccgctcccgccgccgacaagccgtggccatcgggcgacatgtccgaggggctggccggcatgtacgccgcattcaaccctgcgcacgcgacggagttccggtacgaagggacggcgtcggggtacgtccttgggggcgacggcgaccggggcacgtcgatgtggagccaccacagcatgtacagtgggagttccggcaccgaggggggcaggccagcattgcaggaaaaaggcaacgacagcgttggcagcagcggcggcgacgatgaggcggaagacggcaaggagggagggaagggagcctccgacatgtcggggctgtttggatccgattgcgtactctgggacttgcccgacgagctgacgaataacatgtgtgactaaatttacacggcgagcttagctagcatcatcgatgaacgtcagctcgccggagagaagaaatcctagaggctagagccaaacgattctagaagcacataaatttccgacggtgcctgagaagagttagaataagaccatttttacggtaccctgtactgctgatgagagagggagcagtatattcaaatctggccattgattttctaa

SEQ ID NO: 328 - DNA, 1059 bp, synthetic construct
  source 1..1059: mol_type = other DNA; note = Myb80-B coding sequence - TraesCS2B02G351000.1
atgggccggatcccgtgctgcgagaaggacaacgtgaagcgcgggcagtggacgcccgaggaggacaacaagctgctctcctacatcacgcagcacggcacgcgcaactggcgcctcatccccaagaacgccgggctgcagcgctgcgggaagagttgccggctgcggtggaccaactacctgcggcccgacctcaagcacggcgagttcactgacgccgaggagcagaccatcatcaagctgcactccgtcgtcggcaacaggtggtcggtgatcgcggcccagctgccggggcggacggacaacgacgtcaagaaccactggaacaccaagctcaagaagaagctgtccgggatgggcatcgaccccgtcacgcacaagtctttctcgcacctcatggccgagatcgccaccacgctcgccccgccgcaggtggcgcacctcgccgaggccgccctggggtgcttcaaggacgagatgctccacctcctcaccaagaagcgccccaccgacttcccctcgcccgccatacccgacatggcggcgggcgccagcgggggcatggccatgggctcgggcgcgctcatcacgccctgcttcaacgcgccgccacaagccgacgacaccatcgagcgcatcaagatgggcctgtcccgcgccatcatgagcgagcccgccgctcccgccgccgacaagccgtggccatcgggcgacatgtccgaggggctggccggcatgtacgccgcattcaaccctgcgcacgcgacggagttccggtacgaagggacggcgtcggggtacgtccttgggggcgacggcgaccggggcacgtcgatgtggagccaccacagcatgtacagtgggagttccggcaccgaggggggcaggccagcattgcaggaaaaaggcaacgacagcgttggcagcagcggcggcgacgatgaggcggaagacggcaaggagggagggaagggagcctccgacatgtcggggctgtttggatccgattgcgtactctgggacttgcccgacgagctgacgaataacatgtgtgactaa

SEQ ID NO: 329 - protein, 352 aa, synthetic construct
  source 1..352: note = Myb80-B protein sequence - TraesCS2B02G351000.1
MGRIPCCEKDNVKRGQWTPEEDNKLLSYITQHGTRNWRLIPKNAGLQRCGKSCRLRWTNYLRPDLKHGEFTDAEEQTIIKLHSVVGNRWSVIAAQLPGRTDNDVKNHWNTKLKKKLSGMGIDPVTHKSFSHLMAEIATTLAPPQVAHLAEAALGCFKDEMLHLLTKKRPTDFPSPAIPDMAAGASGGMAMGSGALITPCFNAPPQADDTIERIKMGLSRAIMSEPAAPAADKPWPSGDMSEGLAGMYAAFNPAHATEFRYEGTASGYVLGGDGDRGTSMWSHHSMYSGSSGTEGGRPALQEKGNDSVGSSGGDDEAEDGKEGGKGASDMSGLFGSDCVLWDLPDELTNNMCD

SEQ ID NO: 330 - DNA, 2816 bp, Triticum aestivum
  source 1..2816: mol_type = genomic DNA; note = Myb80-B genomic sequence - IWGSC:2B:498308950:498311765:-1
caaagctctgccaataaaaaggaagctcaaaagatttgtcgtattgacagtagcattcttcgagcaatagaatgtagcactagattaactttggaaatatgacttgctcatgtcactgctaattagacgatccattcacctctcaaagtaattttgtggaggaaaatctggagtctctgtctctctgaatgaatgaccttggaattggaattgaccgtagtgctgctttgactcaaaggggcacgggtaagtacaactctacgcacgcacgcacgcacgcactcggcaccggactttgcactgtcagaaagtacgtctcagcccgtcgacgccgcagcgcgcatcggagcggagcggagcatcgacgagctggcgaaaacgcgacggacgccgtgcttgcttggactgggggttgacccggcgctgtgcgggtgggcaacctgtcccgtccctaagggcgctcacgctttgggcggcgttgaattctttatcccgcccatgcctccttcgcccagcgccccgccccgcccttcccgtgccgccggccgcacgcccacacgaccgcgcgccccgcacctatatatacttcccagcgcgccggcggatgcaagcgccgcacgccgatcgaaaattcagacgctcacacactcactcgcaagaacgcagcgccggcgacgtaccggcctaccggaaagcggaatctccacgacggatcccgcgcgcgagcagggcggcctcggaggcggacgcgccgacatgggccggatcccgtgctgcgagaaggacaacgtgaagcgcgggcagtggacgcccgaggaggacaacaagctgctctcctacatcacgcagcacggcacgcgcaactggcgcctcatccccaagaacgccggtgagtccgcggcgcagacgctctggttaagtggaaggaacgtgttgcgttgctgttgtcgctggcgctgaacgaggttgccgcgcgtgacagggctgcagcgctgcgggaagagttgccggctgcggtggaccaactacctgcggcccgacctcaagcacggcgagttcactgacgccgaggagcagaccatcatcaagctgcactccgtcgtcggcaacaggtaccccaggatgatccacgccgtctcgttccgcttctgagctagctgcatctcgctggcgttttgctgatcaatgcgttggcgttggcgttggcgtgcaggtggtcggtgatcgcggcccagctgccggggcggacggacaacgacgtcaagaaccactggaacaccaagctcaagaagaagctgtccgggatgggcatcgaccccgtcacgcacaagtctttctcgcacctcatggccgagatcgccaccacgctcgccccgccgcaggtggcgcacctcgccgaggccgccctggggtgcttcaaggacgagatgctccacctcctcaccaagaagcgccccaccgacttcccctcgcccgccatacccgacatggcggcgggcgccagcgggggcatggccatgggctcgggcgcgctcatcacgccctgcttcaacgcgccgccacaagccgacgacaccatcgagcgcatcaagatgggcctgtcccgcgccatcatgagcgagcccgccgctcccgccgccgacaagccgtggccatcgggcgacatgtccgaggggctggccggcatgtacgccgcattcaaccctgcgcacgcgacggagttccggtacgaagggacggcgtcggggtacgtccttgggggcgacggcgaccggggcacgtcgatgtggagccaccacagcatgtacagtgggagttccggcaccgaggggggcaggccagcattgcaggaaaaaggcaacgacagcgttggcagcagcggcggcgacgatgaggcggaagacggcaaggagggagggaagggagcctccgacatgtcggggctgtttggatccgattgcgtactctgggacttgcccgacgagctgacgaataacatgtgtgactaaatttacacggcgagcttagctagcatcatcgatgaacgtcagctcgccggagagaagaaatcctagaggctagagccaaacgattctagaagcacataaatttccgacggtgcctgagaagagttagaataagaccatttttacggtaccctgtactgctgatgagagagggagcagtatattcaaatctggccattgattttctaagtgtaggatagacatcttgttttctacgcaacactagactcacccgattgatctgttttgcccccttctccctgccgtcgcccgtggccagccgcctcgaccaacgccatgtcggggtgctcagccatgggagagcgtatgttgacgcctcatggcgagtggagggagacctgcaccacgctgctgaccacccggtccaaaaacaaggtggagaaaaggtagccaggctggcgaaggaggaggaggaggtagtagccatgctgtgaaggggttgtagccatcccgtgaaggtgctattgcgatgccgtgacggccagaaccttagtgacgtcgtcggcggataatggcgactagaaatcaagatgtcgctcgtgccggcagcggcgggaatcctacagagcgggccggggcagccaaccgccatggtgtcatctggccgggacggccagccgccgtcgcgggcgagcagcgtgcgcctggagccattggatgcccagaaggcgtagacgtcggttcggaggtcatgcatcgagcagcggtccactcgccggaggacgagacggcggggctgaggtcggcgacgcggccaagccggcgaga

SEQ ID NO: 331 - DNA, 1421 bp, synthetic construct
  source 1..1421: mol_type = other DNA; note = Myb80-D cDNA sequence - TraesCS2D02G331700.1
cacgccgatcgaaaactcagacgctcacacactcactcagcaagaacgcagcgccggcgacgtaccggcctaccggaaagcggagtctccacgacggaccccgtgcgcgcgcagggcggcccgggaggcggaggcgccgacatgggccggatcccgtgctgcgagaaggacaacgtgaagcgcgggcagtggacgcccgaggaggacaacaagctgctctcctacatcacgcagcacggcacgcgcaactggcgcctcatccccaagaacgccgggctgcagcggtgcgggaagagctgccgcctgcggtggaccaactacctgcggcccgacctcaagcacggcgagttcactgacgccgaggagcagaccatcatcaagctgcactccgtcgtcggcaacaggtggtcggtgatcgcggcccagctgccggggcggacggacaacgacgtcaagaaccactggaacaccaagctcaagaagaagctgtccgggatgggcatcgatcccgtcacgcacaagtccttctcgcacctcatggccgagatcgccaccacgctcgccccgccgcaggtggcgcacctcgccgaggccgccctcgggtgcttcaaggacgagatgctccacctcctcaccaagaagcgccccaccgacttcccctcgcccgccatgcccgacatggcggcgggcgccagcgcgggcatggccatgggctcgggcgcgcacatcgcgccctgcttcgccgcgccgccacaagccgacgacaccatcgagcgcatcaagatgggcctgtcccgcgccatcatgagcgagcccgccgctcccgcggccgacaagccgtggccatcgggcgacatgtccgaggggctggccggcatgtacgccgcgttcaaccccgcgcaggcgacggagttccggtacgaagggacggcgtcggggtacgtccttgggggcgacggcgaccagggcacgtcgatgtggagccaccacagcatgtacagcgggagctccggcaccgaggggggcaggccggcattgcaggaaaagggcaacgacagtgtcggcagcagcggcggcgacgaggaggcggaagacggcaaggagggagggaagggagcctccgacatgtcggggctgtttggatccgattgcgtactctgggacttgcccgacgagctgacgaatcacatgtgtgactaaattcacacggcgagcttagctagcatcatcgatgaacgtcagttcgccggagaaaagaaagcctagagccaaacgattttagaagcacataaatttctgacagtgcctgagaagagctagaataaacagggaaactggaaaatggcgtcccttcttcttttttttctgcgtgcagaactgttaagtgtacattgctctgccgctggccatgctattttttg

SEQ ID NO: 332 - DNA, 1059 bp, synthetic construct
  source 1..1059: mol_type = other DNA; note = Myb80-D coding sequence - TraesCS2D02G331700.1
atgggccggatcccgtgctgcgagaaggacaacgtgaagcgcgggcagtggacgcccgaggaggacaacaagctgctctcctacatcacgcagcacggcacgcgcaactggcgcctcatccccaagaacgccgggctgcagcggtgcgggaagagctgccgcctgcggtggaccaactacctgcggcccgacctcaagcacggcgagttcactgacgccgaggagcagaccatcatcaagctgcactccgtcgtcggcaacaggtggtcggtgatcgcggcccagctgccggggcggacggacaacgacgtcaagaaccactggaacaccaagctcaagaagaagctgtccgggatgggcatcgatcccgtcacgcacaagtccttctcgcacctcatggccgagatcgccaccacgctcgccccgccgcaggtggcgcacctcgccgaggccgccctcgggtgcttcaaggacgagatgctccacctcctcaccaagaagcgccccaccgacttcccctcgcccgccatgcccgacatggcggcgggcgccagcgcgggcatggccatgggctcgggcgcgcacatcgcgccctgcttcgccgcgccgccacaagccgacgacaccatcgagcgcatcaagatgggcctgtcccgcgccatcatgagcgagcccgccgctcccgcggccgacaagccgtggccatcgggcgacatgtccgaggggctggccggcatgtacgccgcgttcaaccccgcgcaggcgacggagttccggtacgaagggacggcgtcggggtacgtccttgggggcgacggcgaccagggcacgtcgatgtggagccaccacagcatgtacagcgggagctccggcaccgaggggggcaggccggcattgcaggaaaagggcaacgacagtgtcggcagcagcggcggcgacgaggaggcggaagacggcaaggagggagggaagggagcctccgacatgtcggggctgtttggatccgattgcgtactctgggacttgcccgacgagctgacgaatcacatgtgtgactaa

SEQ ID NO: 333 - protein, 352 aa, synthetic construct
  source 1..352: note = Myb80-D protein sequence - TraesCS2D02G331700.1
MGRIPCCEKDNVKRGQWTPEEDNKLLSYITQHGTRNWRLIPKNAGLQRCGKSCRLRWTNYLRPDLKHGEFTDAEEQTIIKLHSVVGNRWSVIAAQLPGRTDNDVKNHWNTKLKKKLSGMGIDPVTHKSFSHLMAEIATTLAPPQVAHLAEAALGCFKDEMLHLLTKKRPTDFPSPAMPDMAAGASAGMAMGSGAHIAPCFAAPPQADDTIERIKMGLSRAIMSEPAAPAADKPWPSGDMSEGLAGMYAAFNPAQATEFRYEGTASGYVLGGDGDQGTSMWSHHSMYSGSSGTEGGRPALQEKGNDSVGSSGGDEEAEDGKEGGKGASDMSGLFGSDCVLWDLPDELTNHMCD

SEQ ID NO: 334 - DNA, 2803 bp, Triticum aestivum
  source 1..2803: mol_type = genomic DNA; note = Myb80-D genomic sequence - IWGSC:2D:424013456:424016258:-1
aataaaaaggaagctcaaaagatttgtcgtattgacagtagcattctccgagcaatagaatgtagcactagattaatcttggaaatatgacttgctcatgtcactgctaattagacgatccattcacctctcaaagtatttttggagagaaaaatctggagtctttgtctctctgaatgaatgtcattgcaattggaattggaattggaattgaccgtagtgctgctttgactcaaaggggtgcggccgtgcgggtaagtacaactctacgcacgcacgcactcggcacgggactttgcactgtcagaaagtacgtctcagcccgtcgacgccgcagcgtgcatcggagcggagcatcgacgagctggcgaaaacgcgacggacgccgtgcttgcttggactgggggttgacccggcgctgcgcgggtgggcaacctgtcccgtcccccgggacgctcacgctttgggcggcgttgaattctttatcccgcccatgcctccttcgcccagcgccccgccccgccccgcccttcccgtgccgccggccgcacgccccgcacctatatatacttcccagcgcgccggcagatgcaagcgccgcacgccgatcgaaaactcagacgctcacacactcactcagcaagaacgcagcgccggcgacgtaccggcctaccggaaagcggagtctccacgacggaccccgtgcgcgcgcagggcggcccgggaggcggaggcgccgacatgggccggatcccgtgctgcgagaaggacaacgtgaagcgcgggcagtggacgcccgaggaggacaacaagctgctctcctacatcacgcagcacggcacgcgcaactggcgcctcatccccaagaacgccggtgagtccccggcgccagcagacgctctggttacgtcgaaggaacgtgcgttgctgttgttcgctggcgctgaacgaggttgcacccgtgacagggctgcagcggtgcgggaagagctgccgcctgcggtggaccaactacctgcggcccgacctcaagcacggcgagttcactgacgccgaggagcagaccatcatcaagctgcactccgtcgtcggcaacaggtaccagagatgatccacgtcgtctcgttctgagatagctgcatcgctctggagttttgctgatcaatgcgttggcgttggggtgcaggtggtcggtgatcgcggcccagctgccggggcggacggacaacgacgtcaagaaccactggaacaccaagctcaagaagaagctgtccgggatgggcatcgatcccgtcacgcacaagtccttctcgcacctcatggccgagatcgccaccacgctcgccccgccgcaggtggcgcacctcgccgaggccgccctcgggtgcttcaaggacgagatgctccacctcctcaccaagaagcgccccaccgacttcccctcgcccgccatgcccgacatggcggcgggcgccagcgcgggcatggccatgggctcgggcgcgcacatcgcgccctgcttcgccgcgccgccacaagccgacgacaccatcgagcgcatcaagatgggcctgtcccgcgccatcatgagcgagcccgccgctcccgcggccgacaagccgtggccatcgggcgacatgtccgaggggctggccggcatgtacgccgcgttcaaccccgcgcaggcgacggagttccggtacgaagggacggcgtcggggtacgtccttgggggcgacggcgaccagggcacgtcgatgtggagccaccacagcatgtacagcgggagctccggcaccgaggggggcaggccggcattgcaggaaaagggcaacgacagtgtcggcagcagcggcggcgacgaggaggcggaagacggcaaggagggagggaagggagcctccgacatgtcggggctgtttggatccgattgcgtactctgggacttgcccgacgagctgacgaatcacatgtgtgactaaattcacacggcgagcttagctagcatcatcgatgaacgtcagttcgccggagaaaagaaagcctagagccaaacgattttagaagcacataaatttctgacagtgcctgagaagagctagaataaacagggaaactggaaaatggcgtcccttcttcttttttttctgcgtgcagaactgttaagtgtacattgctctgccgctggccatgctattttttgggggtcctgtgcttcagtcaaaacgacttcaattcaaacagatttggtagcatgtcaatgaagctgtctgaccgtaacatgtcaatgttttagtaaaaccgcacaacttttttgaaatgaagctgacgcgctgtaatttaaatatttattcgttggtataaaattttttttaaagatctgctgggcaccaatccgtgctacacttttagggctcctttgagttgcttgattctagaaatgtagaaataagaaaacatagacataggatatgaatgcatgcgcaaaacaaatgattggtgaacacggagattgttaaaggtttctattaactgaattggggagccctttttttcttagaatagcacggaaattctgcctttttcgtggggaattttttcgagttgggtgtacgattcacaagaatgggaaaacacaaaaatccaaataaacatggttaaattaaagtcaaaccacacaaaaatgcatgtttagattgttattatgccactaaggatgttagtctcactcgtggataggaatttgaaaaggatgtccaggtggatattagaattgatgtgttttcctttgaaattgagataa

SEQ ID NO: 335 - DNA, 1079 bp, synthetic construct
  source 1..1079: mol_type = other DNA; note = Dwarf11-A cDNA sequence - TRIDC2AG048380.8
atctacttcaccacgcatcaggctcatgaaactctggtatatattgttctaacactgactgaggttcttgggtatgccgatcattcctcacaggccagagagaggatatcaagcactgtgaagggcattatcgaggagaggaggaaggctgactgctgcaagagggatgatttcctcaacgtgctcctgtcaaccgatgaactctctgacgaggagaaagtgagctttgtgctggactccctgctaggaggatacgagaccacctcactcatgatctccatggtcgtctacttccttgggcagtcagctcaagatctggacctagtgaagagggagcatcaaggcataagatctaccaaagcaaaggaggagtgcttgagctctgaggactacaagaagatggaatatacccaacatgttatcaatgaggcgctgagatgtggaaacattgtcaagtttgtccacaggaaggccctcaaagatgtcagatacaaagagtatctgattccatctggctggaaggtcctacctgttttcagtgctgttcatttgaacccctcgcttcatggaaatgcccaacagtttcagccttgcagatgggagggcccaagccaaggtacaagcaagaagtttacaccattcggcggtggcaccaggctctgccctggatcagagcttgccaaagtagaggctgctttcttcctccatcaccttgtgctcaatttcaggcagatggaaaatcgatggcgatgacattccaatggcatacccgtacgtggagttcccgagaggcctgccgatagaaatcgagccgatttgctctgaatcttgactgggttcttgcagctgcaaacatggcggtgagtgaaaaaagagattgcaagcagtgaagcgaagaagcaccgatgactagcttagcttagctagttcctggaatggggtagctgaggaggttgtgatctcctctgtacatggtgtacatatattttgtccattgtgattacttgaggtggttgggtcaccctgttacatcctccactgtctggactactatcctatagaaaaaaaatgggctcctg

SEQ ID NO: 336 - DNA, 753 bp, synthetic construct
  source 1..753: mol_type = other DNA; note = Dwarf11-A coding sequence - TRIDC2AG048380.8
atctacttcaccacgcatcaggctcatgaaactctggtatatattgttctaacactgactgaggttcttgggtatgccgatcattcctcacaggccagagagaggatatcaagcactgtgaagggcattatcgaggagaggaggaaggctgactgctgcaagagggatgatttcctcaacgtgctcctgtcaaccgatgaactctctgacgaggagaaagtgagctttgtgctggactccctgctaggaggatacgagaccacctcactcatgatctccatggtcgtctacttccttgggcagtcagctcaagatctggacctagtgaagagggagcatcaaggcataagatctaccaaagcaaaggaggagtgcttgagctctgaggactacaagaagatggaatatacccaacatgttatcaatgaggcgctgagatgtggaaacattgtcaagtttgtccacaggaaggccctcaaagatgtcagatacaaagagtatctgattccatctggctggaaggtcctacctgttttcagtgctgttcatttgaacccctcgcttcatggaaatgcccaacagtttcagccttgcagatgggagggcccaagccaaggtacaagcaagaagtttacaccattcggcggtggcaccaggctctgccctggatcagagcttgccaaagtagaggctgctttcttcctccatcaccttgtgctcaatttcaggcagatggaaaatcgatggcgatga

SEQ ID NO: 337 - protein, 250 aa, synthetic construct
  source 1..250: note = Dwarf11-A protein sequence - TRIDC2AG048380.8
IYFTTHQAHETLVYIVLTLTEVLGYADHSSQARERISSTVKGIIEERRKADCCKRDDFLNVLLSTDELSDEEKVSFVLDSLLGGYETTSLMISMVVYFLGQSAQDLDLVKREHQGIRSTKAKEECLSSEDYKKMEYTQHVINEALRCGNIVKFVHRKALKDVRYKEYLIPSGWKVLPVFSAVHLNPSLHGNAQQFQPCRWEGPSQGTSKKFTPFGGGTRLCPGSELAKVEAAFFLHHLVLNFRQMENRWR

SEQ ID NO: 338 - DNA, 1446 bp, synthetic construct
  source 1..1446: mol_type = other DNA; note = Dwarf11-A cDNA sequence - TRIDC2AG048380.2
atggtgggggtgggcgatcttgtgctggctgctccggcgatcctgctcgccttgctcctgactctggtgctgagccacttcctgcctttgctcctcaaccccaaggctccgaggggcagctttggatggccccttgttggcgagaccctcaggttcctcacccctcacgcctccaacacgctgggtagcttcctggaggatcactgctccaggtatgggagggtgttcaagtcccatctgttctgcacccccaccgtagtgtcctgtgaccaggagctgaaccacttcatcctgcagaatgaggagaggttgttccagtgcagctaccccaggccaattcatggcatactgggcaagtcctccatgctggtggtcctcggggaggaccacaagcggctcaggaaccttgctctggccctcgtcacctccaccaagctcaagccaagctaccttggcgacattgagaggattgcgctgcacatagtcgggtcatggcacggcaagggcggcagcatcaccttctgcgaggagcaaacatggacgaaaaactctgcacattttgcgttcagtgtgatagtgaagcaggtgctggggctgtcgccagaggagcctgtcactgccatgatactggaggacttcctcaccttcatgaagggcctcatctctttccctctccgcatcccagggaccccatatgccaaagctgtccaggccagagagaggatatcaagcactgtgaagggcattatcgaggagaggaggaaggctgactgctgcaagagggatgatttcctcaacgtgctcctgtcaaccgatgaactctctgacgaggagaaagtgagctttgtgctggactccctgctaggaggatacgagaccacctcactcatgatctccatggtcgtctacttccttgggcagtcagctcaagatctggacctagtgaagagggagcatcaaggcataagatctaccaaagcaaaggaggagtgcttgagctctgaggactacaagaagatggaatatacccaacatgttatcaatgaggcgctgagatgtggaaacattgtcaagtttgtccacaggaaggccctcaaagatgtcagatacaaagagtatctgattccatctggctggaaggtcctacctgttttcagtgctgttcatttgaacccctcgcttcatggaaatgcccaacagtttcagccttgcagatgggagggcccaagccaaggtacaagcaagaagtttacaccattcggcggtggcaccaggctctgccctggatcagagcttgccaaagtagaggctgctttcttcctccatcaccttgtgctcaatttcagatggaaaatcgatggcgatgacattccaatggcatacccgtacgtggagttcccgagaggcctgccgatagaaatcgagccgatttgctctgaatcttga

SEQ ID NO: 339 - DNA, 1446 bp, synthetic construct; identical to SEQ ID NO: 338
  source 1..1446: mol_type = other DNA; note = Dwarf11-A coding sequence - TRIDC2AG048380.2

SEQ ID NO: 340 - protein, 481 aa, synthetic construct
  source 1..481: note = Dwarf11-A protein sequence - TRIDC2AG048380.2
MVGVGDLVLAAPAILLALLLTLVLSHFLPLLLNPKAPRGSFGWPLVGETLRFLTPHASNTLGSFLEDHCSRYGRVFKSHLFCTPTVVSCDQELNHFILQNEERLFQCSYPRPIHGILGKSSMLVVLGEDHKRLRNLALALVTSTKLKPSYLGDIERIALHIVGSWHGKGGSITFCEEQTWTKNSAHFAFSVIVKQVLGLSPEEPVTAMILEDFLTFMKGLISFPLRIPGTPYAKAVQARERISSTVKGIIEERRKADCCKRDDFLNVLLSTDELSDEEKVSFVLDSLLGGYETTSLMISMVVYFLGQSAQDLDLVKREHQGIRSTKAKEECLSSEDYKKMEYTQHVINEALRCGNIVKFVHRKALKDVRYKEYLIPSGWKVLPVFSAVHLNPSLHGNAQQFQPCRWEGPSQGTSKKFTPFGGGTRLCPGSELAKVEAAFFLHHLVLNFRWKIDGDDIPMAYPYVEFPRGLPIEIEPICSES

SEQ ID NO: 341 - DNA, 1538 bp, synthetic construct
  source 1..1538: mol_type = other DNA; note = Dwarf11-A cDNA sequence - TRIDC2AG048380.5
gtgggcgatcttgtgctggctgctccggcgatcctgctcgccttgctcctgactctggtgctgagccacttcctgcctttgctcctcaaccccaaggctccgaggggcagctttggatggccccttgttggcgagaccctcaggttcctcacccctcacgcctccaacacgctgggtagcttcctggaggatcactgctccaggtatgggagggtgttcaagtcccatctgttctgcacccccaccgtagtgtcctgtgaccaggagctgaaccacttcatcctgcagaatgaggagaggttgttccagtgcagctaccccaggccaattcatggcatactgggcaagtcctccatgctggtggtcctcggggaggaccacaagcggctcaggaaccttgctctggccctcgtcacctccaccaagctcaagccaagctaccttggcgacattgagaggattgcgctgcacatagtcgggtcatggcacggcaagggcggcagcatcaccttctgcgaggaggcaagaaagtttgcgttcagtgtgatagtgaagcaggtgctggggctgtcgccagaggagcctgtcactgccatgatactggaggacttcctcaccttcatgaagggcctcatctctttccctctccgcatcccagggaccccatatgccaaagctgtccaggccagagagaggatatcaagcactgtgaagggcattatcgaggagaggaggaaggctgactgctgcaagagggatgatttcctcaacgtgctcctgtcaaccgatgaactctctgacgaggagaaagtgagctttgtgctggactccctgctaggaggatacgagaccacctcactcatgatctccatggtcgtctacttccttgggcagtcagctcaagatctggacctagtgaagagggagcatcaaggcataagatctaccaaagcaaaggaggagtgcttgagctctgaggactacaagaagatggaatatacccaacatgttatcaatgaggcgctgagatgtggaaacattgtcaagtttgtccacaggaaggccctcaaagatgtcagatacaaagagtatctgattccatctggctggaaggtcctacctgttttcagtgctgttcatttgaacccctcgcttcatggaaatgcccaacagtttcagccttgcagatgggagggcccaagccaaggtacaagcaagaagtttacaccattcggcggtggcaccaggctctgccctggatcagagcttgccaaagtagaggctgctttcttcctccatcaccttgtgctcaatttcaggtatggaaaatcgatggcgatgacattccaatggcatacccgtacgtggagttcccgagaggcctgccgatagaaatcgagccgatttgctctgaatcttgactgggttcttgcagctgcaaacatggcggtgagtgaaaaaagagattgcaagcagtgaagcgaagaagcaccgatgactagcttagcttagctagttcctggaatggggtagctgag

SEQ ID NO: 342 - DNA, 1392 bp, synthetic construct
  source 1..1392: mol_type = other DNA; note = Dwarf11-A coding sequence - TRIDC2AG048380.5
gtgggcgatcttgtgctggctgctccggcgatcctgctcgccttgctcctgactctggtgctgagccacttcctgcctttgctcctcaaccccaaggctccgaggggcagctttggatggccccttgttggcgagaccctcaggttcctcacccctcacgcctccaacacgctgggtagcttcctggaggatcactgctccaggtatgggagggtgttcaagtcccatctgttctgcacccccaccgtagtgtcctgtgaccaggagctgaaccacttcatcctgcagaatgaggagaggttgttccagtgcagctaccccaggccaattcatggcatactgggcaagtcctccatgctggtggtcctcggggaggaccacaagcggctcaggaaccttgctctggccctcgtcacctccaccaagctcaagccaagctaccttggcgacattgagaggattgcgctgcacatagtcgggtcatggcacggcaagggcggcagcatcaccttctgcgaggaggcaagaaagtttgcgttcagtgtgatagtgaagcaggtgctggggctgtcgccagaggagcctgtcactgccatgatactggaggacttcctcaccttcatgaagggcctcatctctttccctctccgcatcccagggaccccatatgccaaagctgtccaggccagagagaggatatcaagcactgtgaagggcattatcgaggagaggaggaaggctgactgctgcaagagggatgatttcctcaacgtgctcctgtcaaccgatgaactctctgacgaggagaaagtgagctttgtgctggactccctgctaggaggatacgagaccacctcactcatgatctccatggtcgtctacttccttgggcagtcagctcaagatctggacctagtgaagagggagcatcaaggcataagatctaccaaagcaaaggaggagtgcttgagctctgaggactacaagaagatggaatatacccaacatgttatcaatgaggcgctgagatgtggaaacattgtcaagtttgtccacaggaaggccctcaaagatgtcagatacaaagagtatctgattccatctggctggaaggtcctacctgttttcagtgctgttcatttgaacccctcgcttcatggaaatgcccaacagtttcagccttgcagatgggagggcccaagccaaggtacaagcaagaagtttacaccattcggcggtggcaccaggctctgccctggatcagagcttgccaaagtagaggctgctttcttcctccatcaccttgtgctcaatttcaggtatggaaaatcgatggcgatgacattccaatggcatacccgtacgtggagttcccgagaggcctgccgatag

SEQ ID NO: 343 - protein, 463 aa, synthetic construct
  source 1..463: note = warf11-A protein sequence - TRIDC2AG048380.5
VGDLVLAAPAILLALLLTLVLSHFLPLLLNPKAPRGSFGWPLVGETLRFLTPHASNTLGSFLEDHCSRYGRVFKSHLFCTPTVVSCDQELNHFILQNEERLFQCSYPRPIHGILGKSSMLVVLGEDHKRLRNLALALVTSTKLKPSYLGDIERIALHIVGSWHGKGGSITFCEEARKFAFSVIVKQVLGLSPEEPVTAMILEDFLTFMKGLISFPLRIPGTPYAKAVQARERISSTVKGIIEERRKADCCKRDDFLNVLLSTDELSDEEKVSFVLDSLLGGYETTSLMISMVVYFLGQSAQDLDLVKREHQGIRSTKAKEECLSSEDYKKMEYTQHVINEALRCGNIVKFVHRKALKDVRYKEYLIPSGWKVLPVFSAVHLNPSLHGNAQQFQPCRWEGPSQGTSKKFTPFGGGTRLCPGSELAKVEAAFFLHHLVLNFRYGKSMAMTFQWHTRTWSSREACR

SEQ ID NO: 344 - DNA, 1482 bp, synthetic construct
  source 1..1482: mol_type = other DNA; note = Dwarf11-A cDNA sequence - TRIDC2AG048380.6
gtgcacagaacctgtttctgaaaaagttttacctattgttttgtgggggagagaggatggaaagatctcataagaccccctatcaaatgatggcaacttaacaacatgaaaaaagatctaacattgcagttgatgtgatgatgatgcagaatgaggagaggttgttccagtgcagctaccccaggccaattcatggcatactgggcaagtcctccatgctggtggtcctcggggaggaccacaagcggctcaggaaccttgctctggccctcgtcacctccaccaagctcaagccaagctaccttggcgacattgagaggattgcgctgcacatagtcgggtcatggcacggcaagggcggcagcatcaccttctgcgaggaggcaagaaagtttgcgttcagtgtgatagtgaagcaggtgctggggctgtcgccagaggagcctgtcactgccatgatactggaggacttcctcaccttcatgaagggcctcatctctttccctctccgcatcccagggaccccatatgccaaagctgtccaggccagagagaggatatcaagcactgtgaagggcattatcgaggagaggaggaaggctgactgctgcaagagggatgatttcctcaacgtgctcctgtcaaccgatgaactctctgacgaggagaaagtgagctttgtgctggactccctgctaggaggatacgagaccacctcactcatgatctccatggtcgtctacttccttgggcagtcagctcaagatctggacctagtgaagagggagcatcaaggcataagatctaccaaagcaaaggaggagtgcttgagctctgaggactacaagaagatggaatatacccaacatgttatcaatgaggcgctgagatgtggaaacattgtcaagtttgtccacaggaaggccctcaaagatgtcagatacaaagagtatctgattccatctggctggaaggtcctacctgttttcagtgctgttcatttgaacccctcgcttcatggaaatgcccaacagtttcagccttgcagatgggagggcccaagccaaggtacaagcaagaagtttacaccattcggcggtggcaccaggctctgccctggatcagagcttgccaaagtagaggctgctttcttcctccatcaccttgtgctcaatttcagatggaaaatcgatggcgatgacattccaatggcatacccgtacgtggagttcccgagaggcctgccgatagaaatcgagccgatttgctctgaatcttgactgggttcttgcagctgcaaacatggcggtgagtgaaaaaagagattgcaagcagtgaagcgaagaagcaccgatgactagcttagcttagctagttcctggaatggggtagctgaggaggttgtgatctcctctgtacatggtgtacatatattttgtccattgtgattacttgaggtggttgggtcaccctgttacatcc

SEQ ID NO: 345 - DNA, 1143 bp, synthetic construct
  source 1..1143: mol_type = other DNA; note = Dwarf11-A coding sequence - TRIDC2AG048380.6
atgatgatgcagaatgaggagaggttgttccagtgcagctaccccaggccaattcatggcatactgggcaagtcctccatgctggtggtcctcggggaggaccacaagcggctcaggaaccttgctctggccctcgtcacctccaccaagctcaagccaagctaccttggcgacattgagaggattgcgctgcacatagtcgggtcatggcacggcaagggcggcagcatcaccttctgcgaggaggcaagaaagtttgcgttcagtgtgatagtgaagcaggtgctggggctgtcgccagaggagcctgtcactgccatgatactggaggacttcctcaccttcatgaagggcctcatctctttccctctccgcatcccagggaccccatatgccaaagctgtccaggccagagagaggatatcaagcactgtgaagggcattatcgaggagaggaggaaggctgactgctgcaagagggatgatttcctcaacgtgctcctgtcaaccgatgaactctctgacgaggagaaagtgagctttgtgctggactccctgctaggaggatacgagaccacctcactcatgatctccatggtcgtctacttccttgggcagtcagctcaagatctggacctagtgaagagggagcatcaaggcataagatctaccaaagcaaaggaggagtgcttgagctctgaggactacaagaagatggaatatacccaacatgttatcaatgaggcgctgagatgtggaaacattgtcaagtttgtccacaggaaggccctcaaagatgtcagatacaaagagtatctgattccatctggctggaaggtcctacctgttttcagtgctgttcatttgaacccctcgcttcatggaaatgcccaacagtttcagccttgcagatgggagggcccaagccaaggtacaagcaagaagtttacaccattcggcggtggcaccaggctctgccctggatcagagcttgccaaagtagaggctgctttcttcctccatcaccttgtgctcaatttcagatggaaaatcgatggcgatgacattccaatggcatacccgtacgtggagttcccgagaggcctgccgatagaaatcgagccgatttgctctgaatcttga

SEQ ID NO: 346 - protein, 380 aa, synthetic construct
  source 1..380: note = Dwarf11-A protein sequence - TRIDC2AG048380.6
MMMQNEERLFQCSYPRPIHGILGKSSMLVVLGEDHKRLRNLALALVTSTKLKPSYLGDIERIALHIVGSWHGKGGSITFCEEARKFAFSVIVKQVLGLSPEEPVTAMILEDFLTFMKGLISFPLRIPGTPYAKAVQARERISSTVKGIIEERRKADCCKRDDFLNVLLSTDELSDEEKVSFVLDSLLGGYETTSLMISMVVYFLGQSAQDLDLVKREHQGIRSTKAKEECLSSEDYKKMEYTQHVINEALRCGNIVKFVHRKALKDVRYKEYLIPSGWKVLPVFSAVHLNPSLHGNAQQFQPCRWEGPSQGTSKKFTPFGGGTRLCPGSELAKVEAAFFLHHLVLNFRWKIDGDDIPMAYPYVEFPRGLPIEIEPICSES

SEQ ID NO: 347 - DNA, 1465 bp, synthetic construct
  source 1..1465: mol_type = other DNA; note = Dwarf11-A cDNA sequence - TRIDC2AG048380.3
gtgggggtgggcgatcttgtgctggctgctccggcgatcctgctcgccttgctcctgactctggtgctgagccacttcctgcctttgctcctcaaccccaaggctccgaggggcagctttggatggccccttgttggcgagaccctcaggttcctcacccctcacgcctccaacacgctgggtagcttcctggaggatcactgctccaggtatgggagggtgttcaagtcccatctgttctgcacccccaccgtagtgtcctgtgaccaggagctgaaccacttcatcctgcagaatgaggagaggttgttccagtgcagctaccccaggccaattcatggcatactgggcaagtcctccatgctggtggtcctcggggaggaccacaagcggctcaggaaccttgctctggccctcgtcacctccaccaagctcaagccaagctaccttggcgacattgagaggattgcgctgcacatagtcgggtcatggcacggcaagggcggcagcatcaccttctgcgaggaggcaagaaaggttggtctccccgtgcatgcactaactacaaccaaagctgtttgcgttcagtgtgatagtgaagcaggtgctggggctgtcgccagaggagcctgtcactgccatgatactggaggacttcctcaccttcatgaagggcctcatctctttccctctccgcatcccagggaccccatatgccaaagctgtccaggccagagagaggatatcaagcactgtgaagggcattatcgaggagaggaggaaggctgactgctgcaagagggatgatttcctcaacgtgctcctgtcaaccgatgaactctctgacgaggagaaagtgagctttgtgctggactccctgctaggaggatacgagaccacctcactcatgatctccatggtcgtctacttccttgggcagtcagctcaagatctggacctagtgaagagggagcatcaaggcataagatctaccaaagcaaaggaggagtgcttgagctctgaggactacaagaagatggaatatacccaacatgttatcaatgaggcgctgagatgtggaaacattgtcaagtttgtccacaggaaggccctcaaagatgtcagatacaaagagtatctgattccatctggctggaaggtcctacctgttttcagtgctgttcatttgaacccctcgcttcatggaaatgcccaacagtttcagccttgcagatgggagggcccaagccaaggtacaagcaagaagtttacaccattcggcggtggcaccaggctctgccctggatcagagcttgccaaagtagaggctgctttcttcctccatcaccttgtgctcaatttcagatggaaaatcgatggcgatgacattccaatggcatacccgtacgtggagttcccgagaggcctgccgatagaaatcgagccgatttgctctgaatcttga

SEQ ID NO: 348 - DNA, 825 bp, synthetic construct
  source 1..825: mol_type = other DNA; note = Dwarf11-A coding sequence - TRIDC2AG048380.3
atgatactggaggacttcctcaccttcatgaagggcctcatctctttccctctccgcatcccagggaccccatatgccaaagctgtccaggccagagagaggatatcaagcactgtgaagggcattatcgaggagaggaggaaggctgactgctgcaagagggatgatttcctcaacgtgctcctgtcaaccgatgaactctctgacgaggagaaagtgagctttgtgctggactccctgctaggaggatacgagaccacctcactcatgatctccatggtcgtctacttccttgggcagtcagctcaagatctggacctagtgaagagggagcatcaaggcataagatctaccaaagcaaaggaggagtgcttgagctctgaggactacaagaagatggaatatacccaacatgttatcaatgaggcgctgagatgtggaaacattgtcaagtttgtccacaggaaggccctcaaagatgtcagatacaaagagtatctgattccatctggctggaaggtcctacctgttttcagtgctgttcatttgaacccctcgcttcatggaaatgcccaacagtttcagccttgcagatgggagggcccaagccaaggtacaagcaagaagtttacaccattcggcggtggcaccaggctctgccctggatcagagcttgccaaagtagaggctgctttcttcctccatcaccttgtgctcaatttcagatggaaaatcgatggcgatgacattccaatggcatacccgtacgtggagttcccgagaggcctgccgatagaaatcgagccgatttgctctgaatcttga

SEQ ID NO: 349 - protein, 274 aa, synthetic construct
  source 1..274: note = Dwarf11-A protein sequence - TRIDC2AG048380.3
MILEDFLTFMKGLISFPLRIPGTPYAKAVQARERISSTVKGIIEERRKADCCKRDDFLNVLLSTDELSDEEKVSFVLDSLLGGYETTSLMISMVVYFLGQSAQDLDLVKREHQGIRSTKAKEECLSSEDYKKMEYTQHVINEALRCGNIVKFVHRKALKDVRYKEYLIPSGWKVLPVFSAVHLNPSLHGNAQQFQPCRWEGPSQGTSKKFTPFGGGTRLCPGSELAKVEAAFFLHHLVLNFRWKIDGDDIPMAYPYVEFPRGLPIEIEPICSES

SEQ ID NO: 350 - DNA, 1613 bp, synthetic construct
  source 1..1613: mol_type = other DNA; note = Dwarf11-A cDNA sequence - TRIDC2AG048380.4
tgggggtgggcgatcttgtgctggctgctccggcgatcctgctcgccttgctcctgactctggtgctgagccacttcctgcctttgctcctcaaccccaaggctccgaggggcagctttggatggccccttgttggcgagaccctcaggtatgggagggtgttcaagtcccatctgttctgcacccccaccgtagtgtcctgtgaccaggagctgaaccacttcatcctgcagaatgaggagaggttgttccagtgcagctaccccaggccaattcatggcatactgggcaagtcctccatgctggtggtcctcggggaggaccacaagcggctcaggaaccttgctctggccctcgtcacctccaccaagctcaagccaagctaccttggcgacattgagaggattgcgctgcacatagtcgggtcatggcacggcaagggcggcagcatcaccttctgcgaggaggcaagaaagtttgcgttcagtgtgatagtgaagcaggtgctggggctgtcgccagaggagcctgtcactgccatgatactggaggacttcctcaccttcatgaagggcctcatctctttccctctccgcatcccagggaccccatatgccaaagctgtccaggccagagagaggatatcaagcactgtgaagggcattatcgaggagaggaggaaggctgactgctgcaagagggatgatttcctcaacgtgctcctgtcaaccgatgaactctctgacgaggagaaagtgagctttgtgctggactccctgctaggaggatacgagaccacctcactcatgatctccatggtcgtctacttccttgggcagtcagctcaagatctggacctagtgaagagggagcatcaaggcataagatctaccaaagcaaaggaggagtgcttgagctctgaggactacaagaagatggaatatacccaacatgttatcaatgaggcgctgagatgtggaaacattgtcaagtttgtccacaggaaggccctcaaagatgtcagatacaaagagtatctgattccatctggctggaaggtcctacctgttttcagtgctgttcatttgaacccctcgcttcatggaaatgcccaacagtttcagccttgcagatgggagggcccaagccaaggtacaagcaagaagtttacaccattcggcggtggcaccaggctctgccctggatcagagcttgccaaagtagaggctgctttcttcctccatcaccttgtgctcaatttcaggtatggaaaatcgatggcgatgacattccaatggcatacccgtacgtggagttcccgagaggcctgccgatagaaatcgagccgatttgctctgaatcttgactgggttcttgcagctgcaaacatggcggtgagtgaaaaaagagattgcaagcagtgaagcgaagaagcaccgatgactagcttagcttagctagttcctggaatggggtagctgaggaggttgtgatctcctctgtacatggtgtacatatattttgtccattgtgattacttgaggtggttgggtcaccctgttacatcctccactgtctggactactatcctatagaaaaaaaatgggctcctg

SEQ ID NO: 351 - DNA, 1335 bp, synthetic construct
  source 1..1335: mol_type = other DNA; note = Dwarf11-A coding sequence - TRIDC2AG048380.4
ggggtgggcgatcttgtgctggctgctccggcgatcctgctcgccttgctcctgactctggtgctgagccacttcctgcctttgctcctcaaccccaaggctccgaggggcagctttggatggccccttgttggcgagaccctcaggtatgggagggtgttcaagtcccatctgttctgcacccccaccgtagtgtcctgtgaccaggagctgaaccacttcatcctgcagaatgaggagaggttgttccagtgcagctaccccaggccaattcatggcatactgggcaagtcctccatgctggtggtcctcggggaggaccacaagcggctcaggaaccttgctctggccctcgtcacctccaccaagctcaagccaagctaccttggcgacattgagaggattgcgctgcacatagtcgggtcatggcacggcaagggcggcagcatcaccttctgcgaggaggcaagaaagtttgcgttcagtgtgatagtgaagcaggtgctggggctgtcgccagaggagcctgtcactgccatgatactggaggacttcctcaccttcatgaagggcctcatctctttccctctccgcatcccagggaccccatatgccaaagctgtccaggccagagagaggatatcaagcactgtgaagggcattatcgaggagaggaggaaggctgactgctgcaagagggatgatttcctcaacgtgctcctgtcaaccgatgaactctctgacgaggagaaagtgagctttgtgctggactccctgctaggaggatacgagaccacctcactcatgatctccatggtcgtctacttccttgggcagtcagctcaagatctggacctagtgaagagggagcatcaaggcataagatctaccaaagcaaaggaggagtgcttgagctctgaggactacaagaagatggaatatacccaacatgttatcaatgaggcgctgagatgtggaaacattgtcaagtttgtccacaggaaggccctcaaagatgtcagatacaaagagtatctgattccatctggctggaaggtcctacctgttttcagtgctgttcatttgaacccctcgcttcatggaaatgcccaacagtttcagccttgcagatgggagggcccaagccaaggtacaagcaagaagtttacaccattcggcggtggcaccaggctctgccctggatcagagcttgccaaagtagaggctgctttcttcctccatcaccttgtgctcaatttcaggtatggaaaatcgatggcgatgacattccaatggcatacccgtacgtggagttcccgagaggcctgccgatag

SEQ ID NO: 352 - protein, 444 aa, synthetic construct
  source 1..444: note = Dwarf11-A protein sequence - TRIDC2AG048380.4
GVGDLVLAAPAILLALLLTLVLSHFLPLLLNPKAPRGSFGWPLVGETLRYGRVFKSHLFCTPTVVSCDQELNHFILQNEERLFQCSYPRPIHGILGKSSMLVVLGEDHKRLRNLALALVTSTKLKPSYLGDIERIALHIVGSWHGKGGSITFCEEARKFAFSVIVKQVLGLSPEEPVTAMILEDFLTFMKGLISFPLRIPGTPYAKAVQARERISSTVKGIIEERRKADCCKRDDFLNVLLSTDELSDEEKVSFVLDSLLGGYETTSLMISMVVYFLGQSAQDLDLVKREHQGIRSTKAKEECLSSEDYKKMEYTQHVINEALRCGNIVKFVHRKALKDVRYKEYLIPSGWKVLPVFSAVHLNPSLHGNAQQFQPCRWEGPSQGTSKKFTPFGGGTRLCPGSELAKVEAAFFLHHLVLNFRYGKSMAMTFQWHTRTWSSREACR

SEQ ID NO: 353 - DNA, 1474 bp, synthetic construct
  source 1..1474: mol_type = other DNA; note = Dwarf11-A cDNA sequence - TRIDC2AG048380.7
ctgtttctgaaaaagttttacctattgttttgtgggggagagaggatggaaagatctcataagaccccctatcaaatgatggcaacttaacaacatgaaaaaagatctaacattgcagttgatgtgatgatgatgcaggtatgggagggtgttcaagtcccatctgttctgcacccccaccgtagtgtcctgtgaccaggagctgaaccacttcatcctgcagaatgaggagaggttgttccagtgcagctaccccaggccaattcatggcatactgggcaagtcctccatgctggtggtcctcggggaggaccacaagcggctcaggaaccttgctctggccctcgtcacctccaccaagctcaagccaagctaccttggcgacattgagaggattgcgctgcacatagtcgggtcatggcacggcaagggcggcagcatcaccttctgcgaggaggcaagaaagtttgcgttcagtgtgatagtgaagcaggtgctggggctgtcgccagaggagcctgtcactgccatgatactggaggacttcctcaccttcatgaagggcctcatctctttccctctccgcatcccagggaccccatatgccaaagctgtccaggccagagagaggatatcaagcactgtgaagggcattatcgaggagaggaggaaggctgactgctgcaagagggatgatttcctcaacgtgctcctgtcaaccgatgaactctctgacgaggagaaagtgagctttgtgctggactccctgctaggaggatacgagaccacctcactcatgatctccatggtcgtctacttccttgggcagtcagctcaagatctggacctagtgaagagggagcatcaaggcataagatctaccaaagcaaaggaggagtgcttgagctctgaggactacaagaagatggaatatacccaacatgttatcaatgaggcgctgagatgtggaaacattgtcaagtttgtccacaggaaggccctcaaagatgtcagatacaaagagtatctgattccatctggctggaaggtcctacctgttttcagtgctgttcatttgaacccctcgcttcatggaaatgcccaacagtttcagccttgcagatgggagggcccaagccaaggtacaagcaagaagtttacaccattcggcggtggcaccaggctctgccctggatcagagcttgccaaagtagaggctgctttcttcctccatcaccttgtgctcaatttcagatggaaaatcgatggcgatgacattccaatggcatacccgtacgtggagttcccgagaggcctgccgatagaaatcgagccgatttgctctgaatcttgactgggttcttgcagctgcaaacatggcggtgagtgaaaaaagagattgcaagcagtgaagcgaagaagcaccgatgactagcttagcttagctagttcctggaatggggtagctgaggag

SEQ ID NO: 354 - DNA, 1065 bp, synthetic construct
  source 1..1065: mol_type = other DNA; note = Dwarf11-A coding sequence - TRIDC2AG048380.7
atgctggtggtcctcggggaggaccacaagcggctcaggaaccttgctctggccctcgtcacctccaccaagctcaagccaagctaccttggcgacattgagaggattgcgctgcacatagtcgggtcatggcacggcaagggcggcagcatcaccttctgcgaggaggcaagaaagtttgcgttcagtgtgatagtgaagcaggtgctggggctgtcgccagaggagcctgtcactgccatgatactggaggacttcctcaccttcatgaagggcctcatctctttccctctccgcatcccagggaccccatatgccaaagctgtccaggccagagagaggatatcaagcactgtgaagggcattatcgaggagaggaggaaggctgactgctgcaagagggatgatttcctcaacgtgctcctgtcaaccgatgaactctctgacgaggagaaagtgagctttgtgctggactccctgctaggaggatacgagaccacctcactcatgatctccatggtcgtctacttccttgggcagtcagctcaagatctggacctagtgaagagggagcatcaaggcataagatctaccaaagcaaaggaggagtgcttgagctctgaggactacaagaagatggaatatacccaacatgttatcaatgaggcgctgagatgtggaaacattgtcaagtttgtccacaggaaggccctcaaagatgtcagatacaaagagtatctgattccatctggctggaaggtcctacctgttttcagtgctgttcatttgaacccctcgcttcatggaaatgcccaacagtttcagccttgcagatgggagggcccaagccaaggtacaagcaagaagtttacaccattcggcggtggcaccaggctctgccctggatcagagcttgccaaagtagaggctgctttcttcctccatcaccttgtgctcaatttcagatggaaaatcgatggcgatgacattccaatggcatacccgtacgtggagttcccgagaggcctgccgatagaaatcgagccgatttgctctgaatcttga

SEQ ID NO: 355 - protein, 354 aa, synthetic construct
  source 1..354: note = Dwarf11-A protein sequence - TRIDC2AG048380.7
MLVVLGEDHKRLRNLALALVTSTKLKPSYLGDIERIALHIVGSWHGKGGSITFCEEARKFAFSVIVKQVLGLSPEEPVTAMILEDFLTFMKGLISFPLRIPGTPYAKAVQARERISSTVKGIIEERRKADCCKRDDFLNVLLSTDELSDEEKVSFVLDSLLGGYETTSLMISMVVYFLGQSAQDLDLVKREHQGIRSTKAKEECLSSEDYKKMEYTQHVINEALRCGNIVKFVHRKALKDVRYKEYLIPSGWKVLPVFSAVHLNPSLHGNAQQFQPCRWEGPSQGTSKKFTPFGGGTRLCPGSELAKVEAAFFLHHLVLNFRWKIDGDDIPMAYPYVEFPRGLPIEIEPICSES

SEQ ID NO: 356 - DNA, 1826 bp, synthetic construct
  source 1..1826: mol_type = other DNA; note = Dwarf11-A cDNA sequence - TRIDC2AG048380.1
cccactactatatagcctccccctcaccttccattccagagagagagagaagcagagggcgagcaagtgaatgatagctagacagagaggcaaggcatggcaggctccatgcagcttgtgagatgtaactaggtagggtggggcggcggcggtggtggtgtggtggtacgagcatgatggtgggggtgggcgatcttgtgctggctgctccggcgatcctgctcgccttgctcctgactctggtgctgagccacttcctgcctttgctcctcaaccccaaggctccgaggggcagctttggatggccccttgttggcgagaccctcaggttcctcacccctcacgcctccaacacgctgggtagcttcctggaggatcactgctccaggtatgggagggtgttcaagtcccatctgttctgcacccccaccgtagtgtcctgtgaccaggagctgaaccacttcatcctgcagaatgaggagaggttgttccagtgcagctaccccaggccaattcatggcatactgggcaagtcctccatgctggtggtcctcggggaggaccacaagcggctcaggaaccttgctctggccctcgtcacctccaccaagctcaagccaagctaccttggcgacattgagaggattgcgctgcacatagtcgggtcatggcacggcaagggcggcagcatcaccttctgcgaggaggcaagaaagtttgcgttcagtgtgatagtgaagcaggtgctggggctgtcgccagaggagcctgtcactgccatgatactggaggacttcctcaccttcatgaagggcctcatctctttccctctccgcatcccagggaccccatatgccaaagctgtccaggccagagagaggatatcaagcactgtgaagggcattatcgaggagaggaggaaggctgactgctgcaagagggatgatttcctcaacgtgctcctgtcaaccgatgaactctctgacgaggagaaagtgagctttgtgctggactccctgctaggaggatacgagaccacctcactcatgatctccatggtcgtctacttccttgggcagtcagctcaagatctggacctagtgaagagggagcatcaaggcataagatctaccaaagcaaaggaggagtgcttgagctctgaggactacaagaagatggaatatacccaacatgttatcaatgaggcgctgagatgtggaaacattgtcaagtttgtccacaggaaggccctcaaagatgtcagatacaaagagtatctgattccatctggctggaaggtcctacctgttttcagtgctgttcatttgaacccctcgcttcatggaaatgcccaacagtttcagccttgcagatgggagggcccaagccaaggtacaagcaagaagtttacaccattcggcggtggcaccaggctctgccctggatcagagcttgccaaagtagaggctgctttcttcctccatcaccttgtgctcaatttcagatggaaaatcgatggcgatgacattccaatggcatacccgtacgtggagttcccgagaggcctgccgatagaaatcgagccgatttgctctgaatcttgactgggttcttgcagctgcaaacatggcggtgagtgaaaaaagagattgcaagcagtgaagcgaagaagcaccgatgactagcttagcttagctagttcctggaatggggtagctgaggaggttgtgatctcctctgtacatggtgtacatatattttgtccattgtgattacttgaggtggttgggtcaccctgttacatcctccactgtctggactactat

SEQ ID NO: 357 - DNA, 1431 bp, synthetic construct
  source 1..1431: mol_type = other DNA; note = Dwarf11-A coding sequence - TRIDC2AG048380.1
atgatggtgggggtgggcgatcttgtgctggctgctccggcgatcctgctcgccttgctcctgactctggtgctgagccacttcctgcctttgctcctcaaccccaaggctccgaggggcagctttggatggccccttgttggcgagaccctcaggttcctcacccctcacgcctccaacacgctgggtagcttcctggaggatcactgctccaggtatgggagggtgttcaagtcccatctgttctgcacccccaccgtagtgtcctgtgaccaggagctgaaccacttcatcctgcagaatgaggagaggttgttccagtgcagctaccccaggccaattcatggcatactgggcaagtcctccatgctggtggtcctcggggaggaccacaagcggctcaggaaccttgctctggccctcgtcacctccaccaagctcaagccaagctaccttggcgacattgagaggattgcgctgcacatagtcgggtcatggcacggcaagggcggcagcatcaccttctgcgaggaggcaagaaagtttgcgttcagtgtgatagtgaagcaggtgctggggctgtcgccagaggagcctgtcactgccatgatactggaggacttcctcaccttcatgaagggcctcatctctttccctctccgcatcccagggaccccatatgccaaagctgtccaggccagagagaggatatcaagcactgtgaagggcattatcgaggagaggaggaaggctgactgctgcaagagggatgatttcctcaacgtgctcctgtcaaccgatgaactctctgacgaggagaaagtgagctttgtgctggactccctgctaggaggatacgagaccacctcactcatgatctccatggtcgtctacttccttgggcagtcagctcaagatctggacctagtgaagagggagcatcaaggcataagatctaccaaagcaaaggaggagtgcttgagctctgaggactacaagaagatggaatatacccaacatgttatcaatgaggcgctgagatgtggaaacattgtcaagtttgtccacaggaaggccctcaaagatgtcagatacaaagagtatctgattccatctggctggaaggtcctacctgttttcagtgctgttcatttgaacccctcgcttcatggaaatgcccaacagtttcagccttgcagatgggagggcccaagccaaggtacaagcaagaagtttacaccattcggcggtggcaccaggctctgccctggatcagagcttgccaaagtagaggctgctttcttcctccatcaccttgtgctcaatttcagatggaaaatcgatggcgatgacattccaatggcatacccgtacgtggagttcccgagaggcctgccgatagaaatcgagccgatttgctctgaatcttga

SEQ ID NO: 358 - protein, 476 aa, synthetic construct; identical to SEQ ID NO: 310
  source 1..476: note = Dwarf11-A protein sequence - TRIDC2AG048380.1

SEQ ID NO: 359 - DNA, 5230 bp, Triticum dicoccoides
  source 1..5230: mol_type = genomic DNA; note = Dwarf11-A genomic sequence - WEWSeq_v.1.0:2A:561794653:561799882:1
aatttagtgaaggctgttctgcatgggaaaacagggcaaggacatgataacaagaacactgctcaaacgagttaccatcggcagaaaaatagaatttcacacaattaaactaatcaagcacagtactatacggcctgctgtgaccaaaactggcactcgatctagttttcagattagcacaagttattatttcagacgcaaggtgcagaccttcacagctcagcaccaaagtcctatgcgcgcatgtaacccgatacaatttctctctctacctgcgcgtttgactgcaccttgagcagcagcagcagcagcagcagcagcagcctagatgctagtagtactgcaaagggaccatactcctagctagacccagccccttgctgataaaagtcattcatacagttcaaatagtatgagtatacatacaagtacaagcagccgggtctgcagtaaaaacagagatcaagccagtagtaaatatatactgctagtggtgtttttgagtacagtagtaattaaaaaaggccaaagcaagaaaacaaaaggcaaccttatttttcctttccctcccgcattgcaaagatccttcctgcccttgctcccactactatatagcctccccctcaccttccattccagagagagagagaagcagagggcgagcaagtgaatgatagctagacagagaggcaaggcatggcaggctccatgcagcttgtgagatgtaactaggtagggtggggcggcggcggtggtggtgtggtggtacgagcatgatggtgggggtgggcgatcttgtgctggctgctccggcgatcctgctcgccttgctcctgactctggtgctgagccacttcctgcctttgctcctcaaccccaaggctccgaggggcagctttggatggccccttgttggcgagaccctcaggttcctcacccctcacgcctccaacacgctgggtagcttcctggaggatcactgctccaggtacttttattttcttcttcttttttgttatcattcaccacagccacaccacacctcaagatttctccacgatgcaatcaagcacgtagtattgtttatcatttactcatgtggcagcaaaagatgatgcatgtcgtgcatgttgtcctgactcagcacctttatcttcctgtctttgctccaaggctgtgatatatttgaatttctacaggttttgtgcacagaacctgtttctgaaaaagttttacctattgttttgtgggggagagaggatggaaagatctcataagaccccctatcaaatgatggcaacttaacaacatgaaaaaagatctaacattgcagttgatgtgatgatgatgcaggtatgggagggtgttcaagtcccatctgttctgcacccccaccgtagtgtcctgtgaccaggagctgaaccacttcatcctgcagaatgaggagaggttgttccagtgcagctaccccaggccaattcatggcatactgggcaagtcctccatgctggtggtcctcggggaggaccacaagcggctcaggaaccttgctctggccctcgtcacctccaccaagctcaagccaagctaccttggcgacattgagaggattgcgctgcacatagtcgggtcatggcacggcaagggcggcagcatcaccttctgcgaggaggcaagaaaggttggtctccccgtgcatgcactaactacaaccaaagctggctaggcatgcatcagtagggacatgatcccgtcaaacatggacgaaaaactctgcacatgttacctatggctacatcatcatgctgttacttgctgatgcatcatcacatattttttcaaacgctggctttgacttaccagggtcattcttctccgtattttgactctctttttctgactttttttttcctttggcacagtttgcgttcagtgtgatagtgaagcaggtgctggggctgtcgccagaggagcctgtcactgccatgatactggaggacttcctcaccttcatgaagggcctcatctctttccctctccgcatcccagggaccccatatgccaaagctgtccaggtaactaagtaaacaactctggaataccaccttcttaaactgtcaaagtttccagcacttcttatctacttcaccacgcatcaggctcatgaaactctggtatatattgttctaacactgactgaggttcttgggtatgccgatcattcctcacaggccagagagaggatatcaagcactgtgaagggcattatcgaggagaggaggaaggctgactgctgcaagagggatgatttcctcaacgtgctcctgtcaaccgatgaactctctgacgaggagaaagtgagctttgtgctggactccctgctaggaggatacgagaccacctcactcatgatctccatggtcgtctacttccttgggcagtcagctcaagatctggacctagtgaaggtacatacatacctgatcaagcttaagccacaggtgactggtggttgcgtgcatgtgtcacttattatatatgaacatgctgtgcatgcagagggagcatcaaggcataagatctaccaaagcaaaggaggagtgcttgagctctgaggactacaagaagatggaatatacccaacatgtaagtaagatgatgatcattcagtacacgctttaggatatgtagccggttggtaagcagggatccttttttctttctattatcagacatccaccaaatatgtgacccttcagaatttatgttttttctgtccgtatgcctgcctatatctggaattttgactagagcaaacaacactttgcaagaacagtgcaaatggggaaggaagggtctcttaatttgttctgtaataattggaatggttcaatgatacatacatacatgcgtggatgtcctttcaggttatcaatgaggcgctgagatgtggaaacattgtcaagtttgtccacaggaaggccctcaaagatgtcagatacaaaggtaattaaccctgctagtacttggggctttcccagcagatcccattgtgctcatcacatgataatggatcaggcaaagggggcggttgggcctttattgctgatttgtgagcattgttattcctaaacacctagcttttgatagaagatgctcaaaagcaagtggacctcttcttttgctctgttgcagagtatctgattccatctggctggaaggtcctacctgttttcagtgctgttcatttgaacccctcgcttcatggaaatgcccaacagtttcagccttgcagatgggaggtatatctgatttccataccatgtgcacgggcatctatatttgtagtcaagtaatgaatacatcttagtttatgcagattagctttaatataatacgcttgtttagggaagcctaactttgacataatatgctttttatgaactattttatacaatgaaaaggtgagaacaaatcagaagagcttatctgtagctttgagagaatcttctttaaggttgctctgttaactaattgatgcctttaattagtgagtgtccaactaacccatgccataataattacttgcaactatcctggtatcttcagatgccaagcaggctttggctgagggcctagtgccttctgtacatggtcctaaccatgattcctcactcaaagccagcatccttggctttgcttcttcattttcttaactcccttgatgaagctagctcatatgcatgacttgtacaattgattgatgcaacagggcccaagccaaggtacaagcaagaagtttacaccattcggcggtggcaccaggctctgccctggatcagagcttgccaaagtagaggctgctttcttcctccatcaccttgtgctcaatttcaggtaaaacatttctcctagccgattaagagatacacatgtagcaactaacgcagcaagagcaacaaatcggagaaacgaagaacctaaatattttctaaggataaatcaacttaagaatgaaattaaccagaggaaatatgaatagcatgaccacagattgatgcagtctcatactagtggagatgctctgcaaacatggcagcatggagtatccaataagtatggcatgcaagttgagtggtaccaaatctggtccatagatatctgcagttatcagattgtgacagaagaaaatgcatctccctctactttttttcagagcaaggagataagtgcttactgaatctctatagttactgatcatggtataatttggcaccctgcagatggaaaatcgatggcgatgacattccaatggcatacccgtacgtggagttcccgagaggcctgccgatagaaatcgagccgatttgctctgaatcttgactgggttcttgcagctgcaaacatggcggtgagtgaaaaaagagattgcaagcagtgaagcgaagaagcaccgatgactagcttagcttagctagttcctggaatggggtagctgaggaggttgtgatctcctctgtacatggtgtacatatattttgtccattgtgattacttgaggtggttgggtcaccctgttacatcctccactgtctggactactatcctatagaaaaaaaatgggctcctggtgtttacatttacttctgaaattcgttatggggagatatgtatgaaccggacctcactgaaacttcgaaacaacgttcttatccttgccaaacagaccatgtaagtcccaaaaaataaagaccatgtaagagaacattgggaatttggcataagcacaccagtcagcagagagtgaagttattgtttaacctttagtgtttacaaagattcatgtaaatcagtatggggagattctacaagggacatttggatagaacgaacaagtccttcagaattcagttgaaactcccatgctcaaatggataatgagaggagatcaatgaacagaggctttgttcaggagtttagagaatgattgcaaaaaaactgtggcccatacaggtctcgaacctgtgaccttcgcgttattagcacgacgctctaaccagctgagctaataggccttgtgtgttaactgagcgagtaaagcacttatatatgaatcatatattttcgtaagttccagaatcagtcaaagcgtatgacctctcttattttttttctccagttccaaatcagtcagggcgtatgttggagaaaatatgacgtactggcagac

SEQ ID NO: 360 - DNA, 1870 bp, synthetic construct
  source 1..1870: mol_type = other DNA; note = Dwarf11-B cDNA sequence - TRIDC2BG050840.1
gggcgagcaagtgaatgatagctagacagacagacagacagagaggcaaggcatggcaggctccatgcagcttgtgagatgtaactaggtagggtggggcggtggcggtggtggtgtgtggtatgagcatgatggtgggggtgggcgatcttgtgctggctgctccggcgatcctgctcgccttgctcctgactctggtgctgagccacttcctgcctttgctcctcaaccccaaggctccaagaggcagctttggatggccccttgttggagagaccctcaggttcctcacccctcacgcctccaacacgctgggtagcttcctggaggatcactgctccaggtatgggagggtgttcaagtcccatctgttctgcacccccaccgtagtgtcctgtgaccaggagctgaaccacttcatcctgcagaatgaggagaggctgttccagtgcagctaccccaggccaattcatggcatactgggcaagtcctccatgctggtggtcctgggggaggaccacaagcggctcaggaaccttgctctggccctggtcacctccacaaagctcaagccaagctaccttggcgacattgagaagattgcgctgcacatagtcggatcatggcatggcaagggcggcaacatcaccttctgcgaggaggcaagaaagtttgcattcagtgtgatagtgaagcaggtgctggcgctgtcaccagaggagcctgtcactgccatgatactggaggacttcctcaccttcatgaagggcctcatctctttccctctccgcatcccagggaccccatacgccaaagctgtccaggccagagagaggatatcaagcactgtgaagggcatcattgaggagaggaggaaggctgactgctgcaagaaggatgatttcctcaacgtgctcctgtcaaccgatgagctctctgacgaggagaaagtgagttttgtgctggactccctgctaggggggtatgagaccacctcactcatgatatccatggtcgtctacttccttgggcagtcagctcaagatctagacctggtgaagagggagcatcaaggcataagatctaccaaagcaaaggaggagtgcttgagctctgaggactacaagaagatggaatatacccaacatgttatcaatgaggcgctgagatgtggaaacattgtcaagtttgtccacaggaaggccctcaaagatgtcagatacaaagagtatctgattccatctggctggaaggtcctacctgtttttagtgctgttcatttgaacccctcacttcatggaaatgcccaacagtttcagccttgcagatgggagggcccaagccaaggtacaagcaagaagtttacgccgttcggcggtggcaccaggctctgccctggatcagagctcgccaaagtagaggctgctttcttcctccatcaccttgtgctcaatttcagatggaaaatcgatggcgatgacattccaatggcatacccgtacgtggagttcccgagaggcctgccgatagaaatcgagccgatttgctctgaatcttgactgggttcttgcagctgcagacatggtggtgggtgaaaaaagagattgcaagcaatgaagaagcaccgatgactagcttagcttagctagttgctggaatggggtagctgaggagattatgatctcctctgtacatggtgtacatatattttatccattgtgattacttgaggtggttgggtcaccctgttacatcctccactgtctggactactatcctatagaaaaaaaaatgggctcctggtgtttacatttacttctgaaattcagtatggggagatatgtatgaaccagacctcactgaaacttcg

SEQ ID NO: 361 - DNA, 1437 bp, synthetic construct
  source 1..1437: mol_type = other DNA; note = Dwarf11-B coding sequence - TRIDC2BG050840.1
atgagcatgatggtgggggtgggcgatcttgtgctggctgctccggcgatcctgctcgccttgctcctgactctggtgctgagccacttcctgcctttgctcctcaaccccaaggctccaagaggcagctttggatggccccttgttggagagaccctcaggttcctcacccctcacgcctccaacacgctgggtagcttcctggaggatcactgctccaggtatgggagggtgttcaagtcccatctgttctgcacccccaccgtagtgtcctgtgaccaggagctgaaccacttcatcctgcagaatgaggagaggctgttccagtgcagctaccccaggccaattcatggcatactgggcaagtcctccatgctggtggtcctgggggaggaccacaagcggctcaggaaccttgctctggccctggtcacctccacaaagctcaagccaagctaccttggcgacattgagaagattgcgctgcacatagtcggatcatggcatggcaagggcggcaacatcaccttctgcgaggaggcaagaaagtttgcattcagtgtgatagtgaagcaggtgctggcgctgtcaccagaggagcctgtcactgccatgatactggaggacttcctcaccttcatgaagggcctcatctctttccctctccgcatcccagggaccccatacgccaaagctgtccaggccagagagaggatatcaagcactgtgaagggcatcattgaggagaggaggaaggctgactgctgcaagaaggatgatttcctcaacgtgctcctgtcaaccgatgagctctctgacgaggagaaagtgagttttgtgctggactccctgctaggggggtatgagaccacctcactcatgatatccatggtcgtctacttccttgggcagtcagctcaagatctagacctggtgaagagggagcatcaaggcataagatctaccaaagcaaaggaggagtgcttgagctctgaggactacaagaagatggaatatacccaacatgttatcaatgaggcgctgagatgtggaaacattgtcaagtttgtccacaggaaggccctcaaagatgtcagatacaaagagtatctgattccatctggctggaaggtcctacctgtttttagtgctgttcatttgaacccctcacttcatggaaatgcccaacagtttcagccttgcagatgggagggcccaagccaaggtacaagcaagaagtttacgccgttcggcggtggcaccaggctctgccctggatcagagctcgccaaagtagaggctgctttcttcctccatcaccttgtgctcaatttcagatggaaaatcgatggcgatgacattccaatggcatacccgtacgtggagttcccgagaggcctgccgatagaaatcgagccgatttgctctgaatcttga

SEQ ID NO: 362 - protein, 478 aa, synthetic construct
  source 1..478: note = Dwarf11-B protein sequence - TRIDC2BG050840.1
MSMMVGVGDLVLAAPAILLALLLTLVLSHFLPLLLNPKAPRGSFGWPLVGETLRFLTPHASNTLGSFLEDHCSRYGRVFKSHLFCTPTVVSCDQELNHFILQNEERLFQCSYPRPIHGILGKSSMLVVLGEDHKRLRNLALALVTSTKLKPSYLGDIEKIALHIVGSWHGKGGNITFCEEARKFAFSVIVKQVLALSPEEPVTAMILEDFLTFMKGLISFPLRIPGTPYAKAVQARERISSTVKGIIEERRKADCCKKDDFLNVLLSTDELSDEEKVSFVLDSLLGGYETTSLMISMVVYFLGQSAQDLDLVKREHQGIRSTKAKEECLSSEDYKKMEYTQHVINEALRCGNIVKFVHRKALKDVRYKEYLIPSGWKVLPVFSAVHLNPSLHGNAQQFQPCRWEGPSQGTSKKFTPFGGGTRLCPGSELAKVEAAFFLHHLVLNFRWKIDGDDIPMAYPYVEFPRGLPIEIEPICSES

SEQ ID NO: 363 - DNA, 1606 bp, synthetic construct
  source 1..1606: mol_type = other DNA; note = Dwarf11-B cDNA sequence - TRIDC2BG050840.2
cagagaggcaaggcatggcaggctccatgcagcttgtgagatgtaactaggtagggtggggcggtggcggtggtggtgtgtggtatgagcatgatggtgggggtgggcgatcttgtgctggctgctccggcgatcctgctcgccttgctcctgactctggtgctgagccacttcctgcctttgctcctcaaccccaaggctccaagaggcagctttggatggccccttgttggagagaccctcaggttcctcacccctcacgcctccaacacgctgggtagcttcctggaggatcactgctccagaatgaggagaggctgttccagtgcagctaccccaggccaattcatggcatactgggcaagtcctccatgctggtggtcctgggggaggaccacaagcggctcaggaaccttgctctggccctggtcacctccacaaagctcaagccaagctaccttggcgacattgagaagattgcgctgcacatagtcggatcatggcatggcaagggcggcaacatcaccttctgcgaggaggcaagaaagtttgcattcagtgtgatagtgaagcaggtgctggcgctgtcaccagaggagcctgtcactgccatgatactggaggacttcctcaccttcatgaagggcctcatctctttccctctccgcatcccagggaccccatacgccaaagctgtccaggccagagagaggatatcaagcactgtgaagggcatcattgaggagaggaggaaggctgactgctgcaagaaggatgatttcctcaacgtgctcctgtcaaccgatgagctctctgacgaggagaaagtgagttttgtgctggactccctgctaggggggtatgagaccacctcactcatgatatccatggtcgtctacttccttgggcagtcagctcaagatctagacctggtgaagagggagcatcaaggcataagatctaccaaagcaaaggaggagtgcttgagctctgaggactacaagaagatggaatatacccaacatgttatcaatgaggcgctgagatgtggaaacattgtcaagtttgtccacaggaaggccctcaaagatgtcagatacaaagagtatctgattccatctggctggaaggtcctacctgtttttagtgctgttcatttgaacccctcacttcatggaaatgcccaacagtttcagccttgcagatgggagggcccaagccaaggtacaagcaagaagtttacgccgttcggcggtggcaccaggctctgccctggatcagagctcgccaaagtagaggctgctttcttcctccatcaccttgtgctcaatttcagatggaaaatcgatggcgatgacattccaatggcatacccgtacgtggagttcccgagaggcctgccgatagaaatcgagccgatttgctctgaatcttgactgggttcttgcagctgcagacatggtggtgggtgaaaaaagagattgcaagcaatgaagaagcaccgatgactagcttagcttagctagttgctggaatggggtagctgaggagattatgatctcctctgtacatggtgtacatatattttatccattgtgattacttg

SEQ ID NO: 364 - DNA, 1065 bp, synthetic construct
  source 1..1065: mol_type = other DNA; note = Dwarf11-B coding sequence - TRIDC2BG050840.2
atgctggtggtcctgggggaggaccacaagcggctcaggaaccttgctctggccctggtcacctccacaaagctcaagccaagctaccttggcgacattgagaagattgcgctgcacatagtcggatcatggcatggcaagggcggcaacatcaccttctgcgaggaggcaagaaagtttgcattcagtgtgatagtgaagcaggtgctggcgctgtcaccagaggagcctgtcactgccatgatactggaggacttcctcaccttcatgaagggcctcatctctttccctctccgcatcccagggaccccatacgccaaagctgtccaggccagagagaggatatcaagcactgtgaagggcatcattgaggagaggaggaaggctgactgctgcaagaaggatgatttcctcaacgtgctcctgtcaaccgatgagctctctgacgaggagaaagtgagttttgtgctggactccctgctaggggggtatgagaccacctcactcatgatatccatggtcgtctacttccttgggcagtcagctcaagatctagacctggtgaagagggagcatcaaggcataagatctaccaaagcaaaggaggagtgcttgagctctgaggactacaagaagatggaatatacccaacatgttatcaatgaggcgctgagatgtggaaacattgtcaagtttgtccacaggaaggccctcaaagatgtcagatacaaagagtatctgattccatctggctggaaggtcctacctgtttttagtgctgttcatttgaacccctcacttcatggaaatgcccaacagtttcagccttgcagatgggagggcccaagccaaggtacaagcaagaagtttacgccgttcggcggtggcaccaggctctgccctggatcagagctcgccaaagtagaggctgctttcttcctccatcaccttgtgctcaatttcagatggaaaatcgatggcgatgacattccaatggcatacccgtacgtggagttcccgagaggcctgccgatagaaatcgagccgatttgctctgaatcttga

SEQ ID NO: 365 - protein, 354 aa, synthetic construct
  source 1..354: note = Dwarf11-B protein sequence - TRIDC2BG050840.2
MLVVLGEDHKRLRNLALALVTSTKLKPSYLGDIEKIALHIVGSWHGKGGNITFCEEARKFAFSVIVKQVLALSPEEPVTAMILEDFLTFMKGLISFPLRIPGTPYAKAVQARERISSTVKGIIEERRKADCCKKDDFLNVLLSTDELSDEEKVSFVLDSLLGGYETTSLMISMVVYFLGQSAQDLDLVKREHQGIRSTKAKEECLSSEDYKKMEYTQHVINEALRCGNIVKFVHRKALKDVRYKEYLIPSGWKVLPVFSAVHLNPSLHGNAQQFQPCRWEGPSQGTSKKFTPFGGGTRLCPGSELAKVEAAFFLHHLVLNFRWKIDGDDIPMAYPYVEFPRGLPIEIEPICSES

SEQ ID NO: 366 - DNA, 1441 bp, synthetic construct
  source 1..1441: mol_type = other DNA; note = Dwarf11-B cDNA sequence - TRIDC2BG050840.3
atggtgggggtgggcgatcttgtgctggctgctccggcgatcctgctcgccttgctcctgactctggtgctgagccacttcctgcctttgctcctcaaccccaaggctccaagaggcagctttggatggccccttgttggagagaccctcaggttcctcacccctcacgcctccaacacgctgggtagcttcctggaggatcactgctccaggtatgggagggtgttcaagtcccatctgttctgcacccccaccgtagtgtcctgtgaccaggagctgaaccacttcatcctgcagaatgaggagaggctgttccagtgcagctaccccaggccaattcatggcatactgggcaagtcctccatgctggtggtcctgggggaggaccacaagcggctcaggaaccttgctctggccctggtcacctccacaaagctcaagccaagctaccttggcgacattgagaagattgcgctgcacatagtcggatcatggcatggcaagggcggcaacatcaccttctgcgaggagacgctggctttgacttaccaggtttgcattcagtgtgatagtgaagcaggtgctggcgctgtcaccagaggagcctgtcactgccatgatactggaggacttcctcaccttcatgaagggcctcatctctttccctctccgcatcccagggaccccatacgccaaagctgtccaggccagagagaggatatcaagcactgtgaagggcatcattgaggagaggaggaaggctgactgctgcaagaaggatgatttcctcaacgtgctcctgtcaaccgatgagctctctgacgaggagaaagtgagttttgtgctggactccctgctaggggggtatgagaccacctcactcatgatatccatggtcgtctacttccttgggcagtcagctcaagatctagacctggtgaagagggagcatcaaggcataagatctaccaaagcaaaggaggagtgcttgagctctgaggactacaagaagatggaatatacccaacatgttatcaatgaggcgctgagatgtggaaacattgtcaagtttgtccacaggaaggccctcaaagatgtcagatacaaagagtatctgattccatctggctggaaggtcctacctgtttttagtgctgttcatttgaacccctcacttcatggaaatgcccaacagtttcagccttgcagatgggagggcccaagccaaggtacaagcaagaagtttacgccgttcggcggtggcaccaggctctgccctggatcagagctcgccaaagtagaggctgctttcttcctccatcaccttgtgctcaatttcagatggaaaatcgatggcgatgacattccaatggcatacccgtacgtggagttcccgagaggcctgccgatagaaatcgagccgatttgctctgaatcttga

SEQ ID NO: 367 - DNA, 825 bp, synthetic construct
  source 1..825: mol_type = other DNA; note = Dwarf11-B coding sequence - TRIDC2BG050840.3
atgatactggaggacttcctcaccttcatgaagggcctcatctctttccctctccgcatcccagggaccccatacgccaaagctgtccaggccagagagaggatatcaagcactgtgaagggcatcattgaggagaggaggaaggctgactgctgcaagaaggatgatttcctcaacgtgctcctgtcaaccgatgagctctctgacgaggagaaagtgagttttgtgctggactccctgctaggggggtatgagaccacctcactcatgatatccatggtcgtctacttccttgggcagtcagctcaagatctagacctggtgaagagggagcatcaaggcataagatctaccaaagcaaaggaggagtgcttgagctctgaggactacaagaagatggaatatacccaacatgttatcaatgaggcgctgagatgtggaaacattgtcaagtttgtccacaggaaggccctcaaagatgtcagatacaaagagtatctgattccatctggctggaaggtcctacctgtttttagtgctgttcatttgaacccctcacttcatggaaatgcccaacagtttcagccttgcagatgggagggcccaagccaaggtacaagcaagaagtttacgccgttcggcggtggcaccaggctctgccctggatcagagctcgccaaagtagaggctgctttcttcctccatcaccttgtgctcaatttcagatggaaaatcgatggcgatgacattccaatggcatacccgtacgtggagttcccgagaggcctgccgatagaaatcgagccgatttgctctgaatcttga

SEQ ID NO: 368 - protein, 274 aa, synthetic construct
  source 1..274: note = Dwarf11-B protein sequence - TRIDC2BG050840.3
MILEDFLTFMKGLISFPLRIPGTPYAKAVQARERISSTVKGIIEERRKADCCKKDDFLNVLLSTDELSDEEKVSFVLDSLLGGYETTSLMISMVVYFLGQSAQDLDLVKREHQGIRSTKAKEECLSSEDYKKMEYTQHVINEALRCGNIVKFVHRKALKDVRYKEYLIPSGWKVLPVFSAVHLNPSLHGNAQQFQPCRWEGPSQGTSKKFTPFGGGTRLCPGSELAKVEAAFFLHHLVLNFRWKIDGDDIPMAYPYVEFPRGLPIEIEPICSES

SEQ ID NO: 369 - DNA, 1461 bp, synthetic construct
  source 1..1461: mol_type = other DNA; note = Dwarf11-B cDNA sequence - TRIDC2BG050840.4
gtgggggtgggcgatcttgtgctggctgctccggcgatcctgctcgccttgctcctgactctggtgctgagccacttcctgcctttgctcctcaaccccaaggctccaagaggcagctttggatggccccttgttggagagaccctcaggttcctcacccctcacgcctccaacacgctgggtagcttcctggaggatcactgctccaggtatgggagggtgttcaagtcccatctgttctgcacccccaccgtagtgtcctgtgaccaggagctgaaccacttcatcctgcagaatgaggagaggctgttccagtgcagctaccccaggccaattcatggcatactgggcaagtcctccatgctggtggtcctgggggaggaccacaagcggctcaggaaccttgctctggccctggtcacctccacaaagctcaagccaagctaccttggcgacattgagaagattgcgctgcacatagtcggatcatggcatggcaagggcggcaacatcaccttctgcgaggaggcaagaaaggttggtcacccggtgcatgcactaaccacacccaaatttgcattcagtgtgatagtgaagcaggtgctggcgctgtcaccagaggagcctgtcactgccatgatactggaggacttcctcaccttcatgaagggcctcatctctttccctctccgcatcccagggaccccatacgccaaagctgtccaggccagagagaggatatcaagcactgtgaagggcatcattgaggagaggaggaaggctgactgctgcaagaaggatgatttcctcaacgtgctcctgtcaaccgatgagctctctgacgaggagaaagtgagttttgtgctggactccctgctaggggggtatgagaccacctcactcatgatatccatggtcgtctacttccttgggcagtcagctcaagatctagacctggtgaagagggagcatcaaggcataagatctaccaaagcaaaggaggagtgcttgagctctgaggactacaagaagatggaatatacccaacatgttatcaatgaggcgctgagatgtggaaacattgtcaagtttgtccacaggaaggccctcaaagatgtcagatacaaagagtatctgattccatctggctggaaggtcctacctgtttttagtgctgttcatttgaacccctcacttcatggaaatgcccaacagtttcagccttgcagatgggagggcccaagccaaggtacaagcaagaagtttacgccgttcggcggtggcaccaggctctgccctggatcagagctcgccaaagtagaggctgctttcttcctccatcaccttgtgctcaatttcagatggaaaatcgatggcgatgacattccaatggcatacccgtacgtggagttcccgagaggcctgccgatagaaatcgagccgatttgctctgaatcttga

SEQ ID NO: 370 - DNA, 1461 bp, synthetic construct; identical to SEQ ID NO: 369
  source 1..1461: mol_type = other DNA; note = Dwarf11-B coding sequence - TRIDC2BG050840.4

SEQ ID NO: 371 - protein, 486 aa, synthetic construct
  source 1..486: note = Dwarf11-B protein sequence - TRIDC2BG050840.4
VGVGDLVLAAPAILLALLLTLVLSHFLPLLLNPKAPRGSFGWPLVGETLRFLTPHASNTLGSFLEDHCSRYGRVFKSHLFCTPTVVSCDQELNHFILQNEERLFQCSYPRPIHGILGKSSMLVVLGEDHKRLRNLALALVTSTKLKPSYLGDIEKIALHIVGSWHGKGGNITFCEEARKVGHPVHALTTPKFAFSVIVKQVLALSPEEPVTAMILEDFLTFMKGLISFPLRIPGTPYAKAVQARERISSTVKGIIEERRKADCCKKDDFLNVLLSTDELSDEEKVSFVLDSLLGGYETTSLMISMVVYFLGQSAQDLDLVKREHQGIRSTKAKEECLSSEDYKKMEYTQHVINEALRCGNIVKFVHRKALKDVRYKEYLIPSGWKVLPVFSAVHLNPSLHGNAQQFQPCRWEGPSQGTSKKFTPFGGGTRLCPGSELAKVEAAFFLHHLVLNFRWKIDGDDIPMAYPYVEFPRGLPIEIEPICSES

SEQ ID NO: 372 - DNA, 5237 bp, Triticum dicoccoides
  source 1..5237: mol_type = genomic DNA; note = Dwarf11-B genomic sequence - WEWSeq_v.1.0:2B:496937309:496942545:1
ataataagaacactgctcaaacgagttagccagaaaattagaatttcacacaatcaaactaatcaagcacagtactatacagcctgctgtgaccaaaactggcactcgatttagttttcagattaccacaagttattatttcagacgcaaggtgaagaccttcacagctcagcaccaaagtcctatgcgtgcatgtaacccgattcatttctctctctctctctacctgcgtgtttgactgcaccttgagcagcagcagcagcagcagcagcctagatgctagtagtactgcaaagggaccatactcctagctagacccagccccttgctgataaaagtcattcatacagttcaaatagtatgagtatacatataagtacatgcagccgggtctgcagtaaaaacagagatcaagcaagtagtaaaatatatactgctagtggtgtttttgagtactaattaaaaaaggccaaagcaagaaaacaaaaggcaaccttatttttcctttccctcccgctttgcaaagatccttcctgcccttgctcccactactatatagcctccccctcaccttccattccagagagagagagaagcagagggcgagcaagtgaatgatagctagacagacagacagacagagaggcaaggcatggcaggctccatgcagcttgtgagatgtaactaggtagggtggggcggtggcggtggtggtgtgtggtatgagcatgatggtgggggtgggcgatcttgtgctggctgctccggcgatcctgctcgccttgctcctgactctggtgctgagccacttcctgcctttgctcctcaaccccaaggctccaagaggcagctttggatggccccttgttggagagaccctcaggttcctcacccctcacgcctccaacacgctgggtagcttcctggaggatcactgctccaggtatttttatttcttcttcttttttgttatcattcaccacagccacacctcaagatttctccacaatgcaaccaagcacgtagtattgtttatcatttactcatgtggcagcaaaagatgatgcatgtcgtgcatgttgtcctgactcagcacctttatctttgtgtcttggctccgaggctgtgatatatttgaatttctacaggttttgtgtacagaacttatttctgaaaagtttcacctattgttttatgggggtgaaaagatggaaagatctcataagaccctctaacaaatgatggcaacttaataacataagaaaagattaacattgtaattgatgtgattgtgcaggtatgggagggtgttcaagtcccatctgttctgcacccccaccgtagtgtcctgtgaccaggagctgaaccacttcatcctgcagaatgaggagaggctgttccagtgcagctaccccaggccaattcatggcatactgggcaagtcctccatgctggtggtcctgggggaggaccacaagcggctcaggaaccttgctctggccctggtcacctccacaaagctcaagccaagctaccttggcgacattgagaagattgcgctgcacatagtcggatcatggcatggcaagggcggcaacatcaccttctgcgaggaggcaagaaaggttggtcacccggtgcatgcactaaccacacccaaagctggctagacatgcatcagtagggacatgatcccgtgaaacatggaggaaaaactctgcacatgttgcctatagctacatcatcatgctgttatttgctgatgcatggatatttttcagacgctggctttgacttaccagggtcattcttctcctttttttgactctttttttctgactcttttttctttcctttggcacagtttgcattcagtgtgatagtgaagcaggtgctggcgctgtcaccagaggagcctgtcactgccatgatactggaggacttcctcaccttcatgaagggcctcatctctttccctctccgcatcccagggaccccatacgccaaagctgtccaggtaactaagtaaacaactctggtataccaccttcttaagctgtcaaagtttccagcacttcttatctacttcaccatgcatcaggctcatgaaactctggtatatattgttctaacaccgaggttcttggctatgttgatcactcctcacaggccagagagaggatatcaagcactgtgaagggcatcattgaggagaggaggaaggctgactgctgcaagaaggatgatttcctcaacgtgctcctgtcaaccgatgagctctctgacgaggagaaagtgagttttgtgctggactccctgctaggggggtatgagaccacctcactcatgatatccatggtcgtctacttccttgggcagtcagctcaagatctagacctggtgaaggtacatacatacctgatcaagcttaagccacaggtgattggtggttgtgtgcatgtcacttattatatatgaacatgctgtgcatgcagagggagcatcaaggcataagatctaccaaagcaaaggaggagtgcttgagctctgaggactacaagaagatggaatatacccaacatgtaagtaagatgatgatcattcagtacacgctttaggatatgtagccggttggtaagcatggatcctttttctttctattatcagccatctgcacaaatatgtgaccctccaaaactgatgtttttttttctgtccatatgcctgcctatatctggaattttgactagagcaaacaacactttgcaagaacagtgcagatggggaagggtctcttaatttgttctgtagtaattggaatggttcaatgatacaaacatgcgtggatgtcctttcaggttatcaatgaggcgctgagatgtggaaacattgtcaagtttgtccacaggaaggccctcaaagatgtcagatacaaaggtaattaaccctgctagtacttggggctttcccagcagatcccattgtgctcatcacatgataatggatcaggcaaagggggcggttgggcctttattgctgatttgtgagcattgttattcctaaacacctagcttttgatagaagatgctcaaaagcaagtggacctcttcttttgctctgttgcagagtatctgattccatctggctggaaggtcctacctgtttttagtgctgttcatttgaacccctcacttcatggaaatgcccaacagtttcagccttgcagatgggaggtatgtctgattttcataccatgtgcatgggcatctatatttgtggtgaagtaatgaatacagcttagtttatgcagattagctttaacataatatgcttgtttagggaagcttaactttgacataatatgcttttttatataaaaaattatatgatgaaaaaggttatagaacaaatcagaagtgcttatctgtagctttgagagaatcttctttaaggttgctctgttaactaattgatgcctttaattagtgagtgtccaactaacccatgccataataattacttgcaactatcctggtatcttcagatgccaagcagcctttggctgagggcctagtgccttctgtacatggtcctaaccatgattcctcactgaaagccagcatccttggctttgcttcttcattttcttaactcccttgatgaagcaagctcatatgcatgacttgtataattgattgatgtaacagggcccaagccaaggtacaagcaagaagtttacgccgttcggcggtggcaccaggctctgccctggatcagagctcgccaaagtagaggctgctttcttcctccatcaccttgtgctcaatttcaggtaaaacatttctcctagccgattaagagatacacatgtaacaactagcgcagcaagagcaacaaatcggagaaacgaagaacataaatattttttgtaaggataaatcaacttaagaatgaaattaaccagaggaaatatgaatagcatgaccacagattgatgcagttatcagtctcatactaatggagatactgtgcaaacatggcagcatggagtatccaataagtatggcatgcaagttgagtggtaccaaatctggtccatagatatctgcagttatcagattgtgacagaagaaaatgcacctccatctttcttcagactagcgagatagtaagtgcttgctgaatctttatagttactgatcatggtataacttggcaccctgcagatggaaaatcgatggcgatgacattccaatggcatacccgtacgtggagttcccgagaggcctgccgatagaaatcgagccgatttgctctgaatcttgactgggttcttgcagctgcagacatggtggtgggtgaaaaaagagattgcaagcaatgaagaagcaccgatgactagcttagcttagctagttgctggaatggggtagctgaggagattatgatctcctctgtacatggtgtacatatattttatccattgtgattacttgaggtggttgggtcaccctgttacatcctccactgtctggactactatcctatagaaaaaaaaatgggctcctggtgtttacatttacttctgaaattcagtatggggagatatgtatgaaccagacctcactgaaacttcgaaacaacgttcctattcttaccaaatagaccatgtatgagggaacattgacataagcacgccagtgaacagagagtgaagttattgcctaaaactggcattaacctttagtgatactaacatgaatccttcagaattcatgtaaattcgtgtggggagattctactatgatcagttatagagagattctatgagggacttttggagataacggataagtccttcagaattcagttgaaattcccatgctcaactggagaatgacaggagagaggagaccaatgatcagaggctttgttcaggagtatagagaatgatatgcaaaatagacagaaaattgtggcccatacaggtctcgaacctgtgaccttcgcgttattagcacgacgctctaaccagctgagctaataggccttgtgtgaagttcgatcgagtaaatcgattatgtatgacatagggtttttttttttgcgggttttttttctttgcgggggacatacgttttttctaagtaccccaatcagtcaaagcgtatgccctctgttattttttccagttccaaatcagtcagggcgtatgttggaataaatatgacgtactg

SEQ ID NO: 373 - DNA, 1055 bp, synthetic construct
  source 1..1055: mol_type = other DNA; note = Myb80-B cDNA sequence - TRIDC2BG050920.1
atgggccggatcccgtgctgcgagaaggacaacgtgaagcgcgggcagtggacgcccgaggaggacaacaagctgctctcctacatcacgcagcacggcacgcgcaactggcgcctcatccccaagaacgccgggctgcagcgctgcgggaagagttgccggctgcggtggaccaactacctgcggcccgacctcaagcacggcgagttcactgacgccgaggagcagaccatcatcaagctgcactccgtcgtcggcaacaggtggtcggtgatcgcggcccagctgccggggcggacggacaacgacgtcaagaaccactggaacaccaagctcaagaagaagctgtccgggatgggcatcgaccccgtcacgcacaagtctttctcgcacctcatggccgagatcgccaccacgctcgccccgccgcaggtggcgcacctcgccgaggccgccctggggtgcttcaaggacgagatgctccacctcctcaccaagaagcgccccaccgacttcccctcgcccgccatacccgacatggcggcgggcgccagcgggggcatggccatgggctcgggcgcgctcatcacgccctgcttcaacgcgccgccacaagccgacgacaccatcgagcgcatcaagatgggcctgtcccgcgccatcatgagcgagcccgccgctcccgccgccgacaagccgtggccatcgggcgacatgtccgaggggctggccggcatgtacgccgcattcaaccctgcgcacgcgacggagttccggtacgaagggacggcgtcggggtacgtccttgggggcgacggcgaccagggcacgtcgatgtggagccaccacagcatgtacagtgggagctccggcaccgaggggggcaggccagcattgcaggaaaaaggcaacgacagcgttggcagcagcggcggcgacgatgaggcggaagacggcaaggagggagggaagggagcctccgacatgtcggggctgtttggatccgattgcgtactctgggacttgcccgacgagctgacgaataacatgtgtga

SEQ ID NO: 374 - DNA, 1053 bp, synthetic construct
  source 1..1053: mol_type = other DNA; note = Myb80-B coding sequence - TRIDC2BG050920.1
atgggccggatcccgtgctgcgagaaggacaacgtgaagcgcgggcagtggacgcccgaggaggacaacaagctgctctcctacatcacgcagcacggcacgcgcaactggcgcctcatccccaagaacgccgggctgcagcgctgcgggaagagttgccggctgcggtggaccaactacctgcggcccgacctcaagcacggcgagttcactgacgccgaggagcagaccatcatcaagctgcactccgtcgtcggcaacaggtggtcggtgatcgcggcccagctgccggggcggacggacaacgacgtcaagaaccactggaacaccaagctcaagaagaagctgtccgggatgggcatcgaccccgtcacgcacaagtctttctcgcacctcatggccgagatcgccaccacgctcgccccgccgcaggtggcgcacctcgccgaggccgccctggggtgcttcaaggacgagatgctccacctcctcaccaagaagcgccccaccgacttcccctcgcccgccatacccgacatggcggcgggcgccagcgggggcatggccatgggctcgggcgcgctcatcacgccctgcttcaacgcgccgccacaagccgacgacaccatcgagcgcatcaagatgggcctgtcccgcgccatcatgagcgagcccgccgctcccgccgccgacaagccgtggccatcgggcgacatgtccgaggggctggccggcatgtacgccgcattcaaccctgcgcacgcgacggagttccggtacgaagggacggcgtcggggtacgtccttgggggcgacggcgaccagggcacgtcgatgtggagccaccacagcatgtacagtgggagctccggcaccgaggggggcaggccagcattgcaggaaaaaggcaacgacagcgttggcagcagcggcggcgacgatgaggcggaagacggcaaggagggagggaagggagcctccgacatgtcggggctgtttggatccgattgcgtactctgggacttgcccgacgagctgacgaataacatgtgt

SEQ ID NO: 375 - protein, 351 aa, synthetic construct
  source 1..351: note = Myb80-B protein sequence - TRIDC2BG050920.1
MGRIPCCEKDNVKRGQWTPEEDNKLLSYITQHGTRNWRLIPKNAGLQRCGKSCRLRWTNYLRPDLKHGEFTDAEEQTIIKLHSVVGNRWSVIAAQLPGRTDNDVKNHWNTKLKKKLSGMGIDPVTHKSFSHLMAEIATTLAPPQVAHLAEAALGCFKDEMLHLLTKKRPTDFPSPAIPDMAAGASGGMAMGSGALITPCFNAPPQADDTIERIKMGLSRAIMSEPAAPAADKPWPSGDMSEGLAGMYAAFNPAHATEFRYEGTASGYVLGGDGDQGTSMWSHHSMYSGSSGTEGGRPALQEKGNDSVGSSGGDDEAEDGKEGGKGASDMSGLFGSDCVLWDLPDELTNNMC

SEQ ID NO: 376 - DNA, 1249 bp, Triticum dicoccoides
  source 1..1249: mol_type = genomic DNA; note = Myb80-B genomic sequence - WEWSeq_v.1.0:2B:497491088:497492336:-1
atgggccggatcccgtgctgcgagaaggacaacgtgaagcgcgggcagtggacgcccgaggaggacaacaagctgctctcctacatcacgcagcacggcacgcgcaactggcgcctcatccccaagaacgccggtgagtccgcggcgcagacgctctggttaagtggaaggaacgtgttgcgttgctgttgtcgctggcgctgaacgaggttgccgcgcgtgacagggctgcagcgctgcgggaagagttgccggctgcggtggaccaactacctgcggcccgacctcaagcacggcgagttcactgacgccgaggagcagaccatcatcaagctgcactccgtcgtcggcaacaggtaccccaggatgatccacgccgtctcgttccgcgtctgagctagctgcatctcgctggcgttttgctgatcaatgcgttggcgttggcgttggcgtgcaggtggtcggtgatcgcggcccagctgccggggcggacggacaacgacgtcaagaaccactggaacaccaagctcaagaagaagctgtccgggatgggcatcgaccccgtcacgcacaagtctttctcgcacctcatggccgagatcgccaccacgctcgccccgccgcaggtggcgcacctcgccgaggccgccctggggtgcttcaaggacgagatgctccacctcctcaccaagaagcgccccaccgacttcccctcgcccgccatacccgacatggcggcgggcgccagcgggggcatggccatgggctcgggcgcgctcatcacgccctgcttcaacgcgccgccacaagccgacgacaccatcgagcgcatcaagatgggcctgtcccgcgccatcatgagcgagcccgccgctcccgccgccgacaagccgtggccatcgggcgacatgtccgaggggctggccggcatgtacgccgcattcaaccctgcgcacgcgacggagttccggtacgaagggacggcgtcggggtacgtccttgggggcgacggcgaccagggcacgtcgatgtggagccaccacagcatgtacagtgggagctccggcaccgaggggggcaggccagcattgcaggaaaaaggcaacgacagcgttggcagcagcggcggcgacgatgaggcggaagacggcaaggagggagggaagggagcctccgacatgtcggggctgtttggatccgattgcgtactctgggacttgcccgacgagctgacgaataacatgtgtga

SEQ ID NO: 377 - DNA, 1302 bp, synthetic construct
  source 1..1302: mol_type = other DNA; note = Dwarf11 cDNA sequence - TRIUR3_23488-T1
atggtgggggtgggcgatcttgtgctggctgctccggcgatcctgctcgccttgctcctgactctggtgctgagccacttcctgcctttgctcctcaaccccaaggctccgaggggcagctttggatggccccttgttggcgagaccctcaggttcctcacccctcacgcctccaacacgctgggtagcttcctggaggatcactgctccaggtatgggagggtgttcaagtcccatctgttctgcacccccaccgtagtgtcctgtgaccaggagctgaaccacttcatcctgcagaatgaggagaggttgttccagtgcagctaccccaggccaattcatggcatactgggcaagtcctccatgctggtggtcctcggggaggaccacaagcggctcaggaaccttgcgctggccctcgtcacctccaccaagctcaagccaagctaccttggcgacattgagaggattgcgctgcacatagtcgggtcatggcacggcaagggcggcagcatcaccttctgcgaggaggcaagaaagtttgcgttcagtgtgatagtgaagcaggccagagagaggatatcaagcactgtgaagggcattatcgaggagaggaggaaggctgactgctgcaagagggatgatttcctcaacgtgctcctgtcaaccgatgaactctctgacgaggagaaagtgagctttgtgctggactccctgctaggaggatacgagaccacctcactcatgatctccatggtcgtctacttccttgggcagtcagctcaagatctggacctagtgaagagggagcatcaaggcataagatctaccaaagcaaaggaggagtgcttgagctctgaggactacaagaagatggaatatacccaacatgttatcaatgaggcgctgagatgtggaaacattgtcaagtttgtccacaggaaggccctcaaagatgtcagatacaaagagtatctgattccatctggctggaaggtcctacctgttttcagtgctgttcatttgaacccctcgcttcatggaaatgcccaacagtttcagccttgcagatgggagggcccaagccaaggtacaagcaagaagtttacaccattcggcggtggcaccaggctctgccctggatcagagcttgccaaagtagaggctgctttcttcctccatcaccttgtgctcaatttcagatggaaaatcgatggcgatgacattccaatggcatacccgtacgtggagttcccgagaggcctgccgatagaaatcgagccgatttgctctgaatcttga

SEQ ID NO: 378 - DNA, 1302 bp, synthetic construct; identical to SEQ ID NO: 377
  source 1..1302: mol_type = other DNA; note = Dwarf11 coding sequence - TRIUR3_23488-T1

SEQ ID NO: 379 - protein, 433 aa, synthetic construct
  source 1..433: note = Dwarf11 protein sequence - TRIUR3_23488-T1
MVGVGDLVLAAPAILLALLLTLVLSHFLPLLLNPKAPRGSFGWPLVGETLRFLTPHASNTLGSFLEDHCSRYGRVFKSHLFCTPTVVSCDQELNHFILQNEERLFQCSYPRPIHGILGKSSMLVVLGEDHKRLRNLALALVTSTKLKPSYLGDIERIALHIVGSWHGKGGSITFCEEARKFAFSVIVKQARERISSTVKGIIEERRKADCCKRDDFLNVLLSTDELSDEEKVSFVLDSLLGGYETTSLMISMVVYFLGQSAQDLDLVKREHQGIRSTKAKEECLSSEDYKKMEYTQHVINEALRCGNIVKFVHRKALKDVRYKEYLIPSGWKVLPVFSAVHLNPSLHGNAQQFQPCRWEGPSQGTSKKFTPFGGGTRLCPGSELAKVEAAFFLHHLVLNFRWKIDGDDIPMAYPYVEFPRGLPIEIEPICSES

SEQ ID NO: 380 - DNA, 5094 bp, Triticum urartu
  source 1..5094: mol_type = genomic DNA; note = Dwarf11 genomic sequence - ASM34745v1:scaffold51589:70981:76074:1
ttcagattagcacaagttattatttcagacgcaaggtgcagaccttcacagctcagcaccaaagtcctatgcgcgcatgtaacccgatacaatttctctctctacctgcgcgtttgactgcaccttgagcagcagcagcagcagcagcctagatgctagtagtactgcaaagggaccatactcctagctagacccagccccttgctgataaaagtcattcatacagttcaaatagtatgagtatacatacaagtacaagcagccgggtctgcagtaaaaacagagatcaagccagtagtaaatatatactgctagtggtgtttttgagtacagtagtaattaaaaaaggccaaagcaagaaaacaaaaggcagccttatttttcctttccctcccgcattgcaaagatccttcctgcccttgctcccactactatatagcctccccctcaccttccattccagagagagagagaagcagagggcgagcaagtgaatgatagctagacagagaggcaaggcatggcaggctccatgcagcttgtgagatgtaactaggtagggtggggcggcggcagtggtggtgtggtggtacgagcatgatggtgggggtgggcgatcttgtgctggctgctccggcgatcctgctcgccttgctcctgactctggtgctgagccacttcctgcctttgctcctcaaccccaaggctccgaggggcagctttggatggccccttgttggcgagaccctcaggttcctcacccctcacgcctccaacacgctgggtagcttcctggaggatcactgctccaggtacttttattttcttcttcttttttgttatcattcaccacagccacaccacacctcaagatttctccacgatgcaatcaagcacgtagtattgtttatcatttactcatgtggcagcaaaagatgatgcatgtcgtgcatgttgtcctgactcagcacctttatcttcctgtctttgctccaaggctgtgatatatttgaatttctacaggttttgtgcacagaacctgtttctgaaaaagttttacctattgttttgtgggggagagaggatggaaagatctcataagaccccctatcaaatgatggcaacttaacaacatgaaaaaagatctaacattgcagttgatgtgatgatgatgcaggtatgggagggtgttcaagtcccatctgttctgcacccccaccgtagtgtcctgtgaccaggagctgaaccacttcatcctgcagaatgaggagaggttgttccagtgcagctaccccaggccaattcatggcatactgggcaagtcctccatgctggtggtcctcggggaggaccacaagcggctcaggaaccttgcgctggccctcgtcacctccaccaagctcaagccaagctaccttggcgacattgagaggattgcgctgcacatagtcgggtcatggcacggcaagggcggcagcatcaccttctgcgaggaggcaagaaaggttggtctccccgtgcatgcactaactacaaccaaagctggctaggcatgcatcagtagggacatgatcccgtcaaacatggacgaaaaactctgcacatgttacctatggctacatcatcatgctgttacttgctgatgcatcatcacatattttttcaaacgctggctttgacttaccagggtcattcttctccgtattttgactctctttttctgactttttttttcctttggcacagtttgcgttcagtgtgatagtgaagcaggtgctggggctgtcgccagaggagcctgtcactgccatgatactggaggacttcctcaccttcatgaagggccnnnnnnnnnnnnnnnnnnnnnnnnnnnnnnnnnnnnnnnnnnnnnnnnnnnnnnnnnnnnnnnnnnnnnnnnnnnnnnnnnnnnnnnnnnnnnnnnnnnnnnnnnnnnnnnnnnnnnnnnnnnnnnnnnnnnnnnnnnnnnnnnnnnnnnnnnnnnnnnnnnnnnnnnnnnnnnnnnnnnnnnnnnnnnnnnnnnnnnnnnnnnnnnnnnnnnnnnnnnnnnnnnnnnnnnnnnnnnnnnnnnnnnnnnnnnnnnnnnnnnnnnnnnnnnnnnnnnnnnnnnnnnnnnnnnnnntttccctctccgcatcccagggaccccatacgccaaagctgtccaggtaactaagtaaacaactctggaataccaccttcttaaactgtcaaagtttccagcacttcttatctacttcaccatgcatcaggctcatgaaactctggtatatattgttctaacactgactgaggttcttgggtatgccgatcattcctcacaggccagagagaggatatcaagcactgtgaagggcattatcgaggagaggaggaaggctgactgctgcaagagggatgatttcctcaacgtgctcctgtcaaccgatgaactctctgacgaggagaaagtgagctttgtgctggactccctgctaggaggatacgagaccacctcactcatgatctccatggtcgtctacttccttgggcagtcagctcaagatctggacctagtgaaggtacatacatacctgatcaagcttaagccacaggtgattggtggttgcgtgcatgtgtcacttattatatatgaacatgctgtgcatgcagagggagcatcaaggcataagatctaccaaagcaaaggaggagtgcttgagctctgaggactacaagaagatggaatatacccaacatgtaagtaagatgatgatcattcagtacacgctttaggatatgtagccggttggtaagcagggatccttttttctttctattatcagacatccaccaaatatgtgacccttcagaatttatgttttttctgtccgtatgcctgcctatatctggaatttttactagagcaaacaacactttgcaagaacagtgcaaatggggaaggaagggtctcttaatttgttctgtaataattggaatggttcaatgatacatacatacatgcgtggatgtcctttcaggttatcaatgaggcgctgagatgtggaaacattgtcaagtttgtccacaggaaggccctcaaagatgtcagatacaaaggtaattaaccctgctagtacttggggctttcccagcagatcccattgtgctcatcacatgataatggatcaggcaaagggggcggttgggcctttattgctgatttgtgagcattgttattcctaaacacctagcttttgatagaagatgctcaaaagcaagtggacctcttcttttgctctgttgcagagtatctgattccatctggctggaaggtcctacctgttttcagtgctgttcatttgaacccctcgcttcatggaaatgcccaacagtttcagccttgcagatgggaggtatgtctgatttccataccatgtgcacgggcatctatatttgtagtcaagtaatgaatacatcttagtttatgcagattagctttaacataatatgcttgtttagggaagcctaactttgacataatatgctttttatgaactattttatacaatgaaaaggtgagaacaaatcagaagagcttatctgtagctttgagagaatcttctttaaggttgctctgttaactaattgatgcctttaattagtgagtgtccaactaacccatgccataataattacttgcaactatcctggtatcttcagatgccaagcaggctttggctgagggcctagtgccttctgtacatggtcctaaccatgattcctcactcaaagccagcatccttggctttgcttcttcattttcttaactcccttgatgaagctagctcatatgcatgacttgtacaattgattgatgcaacagggcccaagccaaggtacaagcaagaagtttacaccattcggcggtggcaccaggctctgccctggatcagagcttgccaaagtagaggctgctttcttcctccatcaccttgtgctcaatttcaggtaaaacacttctcctagccgattaagagatacacatgtagcaactaacgcagcaagagcaacaaatcggagaaacgaagaacctaaatattttgtaaggataaatcaacttaagaatgaaattaaccagaggaaatatgaatagcatgaccacagattgatgcagtctcatactagtggagatgctgtgcaaacatggcagcatggagtatccaataagtatggcatgcaagttgagtggtaccaaatctggtccatagatatctgcagttatcagattgtgacagaagaaaatgcatctccctctactttttttcagagcaaggagataagtgcttactgaatctctatagttactgatcatggtataatttggcaccctgcagatggaaaatcgatggcgatgacattccaatggcatacccgtacgtggagttcccgagaggcctgccgatagaaatcgagccgatttgctctgaatcttgactgggttcttgcagctgcaaacatggcggtgagtgaaaaaagagattgcaagcagtgaagcgaagaagcaccgatgactagcttagcttagctagttcctggaatggggtagctgaggaggttgtgatctcctctgtacatggtgtacatatattttgtccattgtgattacttgaggtggttgggtcaccctgttacatcctccactgtctggactactatcctatagaaaaaaaatgggctcctggtgtttacatttacttctgaaattcgttatggggagatatgtatgaaccggacctcactgaaacttcgaaacaacgttcttatccttgccaaacagaccatgtaagtcccaaaaaataaagaccatgtaagagaacattgggaatttggcataagcacaccagtcagcagagagtgaagttattgtttaaaactggtactatttaaccttagtgtttacaaaagattcatgtaaaccagtatggggagattctacaagggacatttggatagaacgaacaagtccttcagaattcagttgaaactcccatgctccaatggataatgagaggagatcaatgaacagaggctttg

SEQ ID NO: 381 - DNA, 834 bp, synthetic construct
  source 1..834: mol_type = other DNA; note = Myb80 cDNA sequence - TRIUR3_35325-T1
atgggccggatcccgtgctgcgagaaggacaacgtgaagcgcgggcagtggacgcccgaggaggacaacaagctgctctcctacatcacgcagcacggcacgcgcaactggcgcctcatccccaagaacgccgggctgcagcggtgcgggaagagctgccggctgcggtggaccaactacctgcggcccgacctcaagcacggcgagttcaccgacgccgaggagcagaccatcatcaagctgcactccgtcgtcggcaacaggtggtcggtgatcgcggcccagctgccggggcggacggacaacgacgtcaagaaccactggaacaccaagctcaagaagaagctgtccgggatgggcatcgaccccgtcacgcacaagtccttctcgcacctcatggccgagatcgccaccacgctcgccccgccgcaggtggcgcacctcgccgagggcggcccgccccccccgccggccgacaagtcggggccgtcgggcgacatgtccgaggggctggcctgcatgtacgccgcgttcaaccccgcgcaggcggcggagttccggtacgaagggacggcgtcggggtacgtccttgggggcgacggcgaccagggcacgtcgatgtggagccgccacagcatgtacagcgggagctccggcaccgaggggggcaggccggcattgcaggaaaagggcaacgacagcgtcggcagcagcggcggcgacgaggaggcggaagacggcaaggagggagggaagggagcctccgacatgtcgggactgtttggatcagattgcgtgctctgggacttgcccgacgagctgacgaatcacatg

SEQ ID NO: 382 - DNA, 834 bp, synthetic construct; identical to SEQ ID NO: 381
  source 1..834: mol_type = other DNA; note = Myb80 coding sequence - TRIUR3_35325-T1

SEQ ID NO: 383 - protein, 278 aa, synthetic construct
  source 1..278: note = Myb80 protein sequence - TRIUR3_35325-T1
MGRIPCCEKDNVKRGQWTPEEDNKLLSYITQHGTRNWRLIPKNAGLQRCGKSCRLRWTNYLRPDLKHGEFTDAEEQTIIKLHSVVGNRWSVIAAQLPGRTDNDVKNHWNTKLKKKLSGMGIDPVTHKSFSHLMAEIATTLAPPQVAHLAEGGPPPPPADKSGPSGDMSEGLACMYAAFNPAQAAEFRYEGTASGYVLGGDGDQGTSMWSRHSMYSGSSGTEGGRPALQEKGNDSVGSSGGDEEAEDGKEGGKGASDMSGLFGSDCVLWDLPDELTNHM

SEQ ID NO: 384 - DNA, 2446 bp, Triticum urartu
  source 1..2446: mol_type = genomic DNA; note = Myb80 genomic sequence - ASM34745v1:scaffold23868:10710:13155:-1
tcaaagtattttttggagagaaacatccggagtctctctgaatgaatgaccgtagcgccgcccttgactcaaaggggtacgggtaagtacaactctatgcacgcacgcactcggcacaggacttcgcactgtcagaaagtacatctcagcccgtcgacgccgcggcgcgcaccggatcgagcggagtggagcatcgacgacgacgagctggcgaaaacgcgacggacgccgtgcttgcttggactgggggttgacccggcgctgcgcgggtgggcaacctgtcccgtcccccggggcgctcacgctttgggcggcgttgaattctttatcccgcccatgcctccttcgcccagcgccccgccccgccccgcccttcccgtgccgccggccgcacgcccgcacgaccgcgcgccccgcacctatatatacttcccagcgcgccggcagatgcaagcgccgcacgccgatcgaaaactcagtcgctcgaacactcacccagcaagaacgcagcgccggcgacgtatcggcctaccggaaagcggagcctccacgacggatcccgtgcgcgcgcagggcggtccgggaggcggaggcgccgacatgggccggatcccgtgctgcgagaaggacaacgtgaagcgcgggcagtggacgcccgaggaggacaacaagctgctctcctacatcacgcagcacggcacgcgcaactggcgcctcatccccaagaacgccggtgagtccccggcgccagcagacgctctggttaagtggaaggaacgtgttgcgttgctgttgtcgctggcgctgaacgaggttcccgcgcgtgacagggctgcagcggtgcgggaagagctgccggctgcggtggaccaactacctgcggcccgacctcaagcacggcgagttcaccgacgccgaggagcagaccatcatcaagctgcactccgtcgtcggcaacaggtgccccaggatcatccacgccgtctcgttctcgtctgagctggctgcatctctatgccgttttgctgatcgatgcgttggcgttggcgtgcaggtggtcggtgatcgcggcccagctgccggggcggacggacaacgacgtcaagaaccactggaacaccaagctcaagaagaagctgtccgggatgggcatcgaccccgtcacgcacaagtccttctcgcacctcatggccgagatcgccaccacgctcgccccgccgcaggtggcgcacctcgccgagggcgcnnnnnnnnnnnnnnnnnnnnnnnnnnnnnnnnnnnnnnnnnnnnnnnnnnnnnnnnnnnnnnnnnnnnnnnnnnnnnnnnnnnnnnnnnnnnnnnnnnnnnnnnnnnnnnnnnnnnnnnnnnnnnnnnnnnnnnnnnnnnnnnnnnnnnnnnnnnnnnnnnnnnnnnnnnnnnnnnnnnnnnnnnnnnnnnnnnnnnnnnnnnnnnnnnnnnnnnnnnnngcccgccccccccgccggccgacaagtcggggccgtcgggcgacatgtccgaggggctggcctgcatgtacgccgcgttcaaccccgcgcaggcggcggagttccggtacgaagggacggcgtcggggtacgtccttgggggcgacggcgaccagggcacgtcgatgtggagccgccacagcatgtacagcgggagctccggcaccgaggggggcaggccggcattgcaggaaaagggcaacgacagcgtcggcagcagcggcggcgacgaggaggcggaagacggcaaggagggagggaagggagcctccgacatgtcgggactgtttggatcagattgcgtgctctgggacttgcccgacgagctgacgaatcacatgtgtgactgaattcacacggcgagcttagctagcatcatcgatgaacgtcagttcgccggagaaaagaaagcctagagccaaacgattctagaagcacataaatttctgacggtgcctgagaagagttagaataaacagggaaactggaaaatggcatacgttcttttttttctgcgtgcagaactgttaagtgtacattgctctgccgctggccatgctattttttgggggtcctgtctcctgtgcttcagtcaaaacgacttcaattcaaacagatttggtagcatgtcaatgaagctgtctgaccgtaacatgtcaatgttttagtaaaaccatacaacttttcttgaaatgaacatgacgcactgtaattcaaatacttagggcttgttcggagtccctcccgcttcgtgactctgttcccggagcagccggagccgcggtttagatttattgagcgaggaaacaggtactccgcggatccttggatttggcggagtcggaggtttcccgaacagctccttattcgttggtacatttctttttaagatctgctgggcaccaatccgtgctacacttttagggcttctttgagttgct

SEQ ID NO: 385 - DNA, 1535 bp, synthetic construct
  source 1..1535: mol_type = other DNA; note = Dwarf11 cDNA sequence - Zm00001d003349_T001
agagagagaagggagaggcgagggagctcaccaggagagaggggcctgtgtgagcattgagcaaagcaaacgaagcagtacatacatctctcgctcgcagaggcccggccggccggctccatgcaacaagggacgacgagcggtggcggtgggcgatgatgatgatgatggcgggggagcacgtgctggccgctctggccaccctgcttctggcctcgctcctgaccctggtgctgaaccacttcctgcccttgcttctgaaccccaaggcccccaggggaagcttcgggtggccgctcctcggcgagacgctcaggttcctcacgccgcacgcctccaacacgctgggcggcttcctcgaggatcactgctccaggtatgggcgggtgttcaagtcccacctgttctgcaccccgacggtggtgtcctgcgaccaggacctcaaccacttcatcctgcagaacgaggagcggctgttccagtgcagctacccgaggccgatccatggcatcctgggcaagtcctccatgctcgtcgtcctgggcgaggaccacaagcgcctcaggaacctcgccctcgccctcgtcacctccaccaagctcaagcccagctacctaggcgacatcgagaagatcgcgctgcacgtcgtcggcgcatggcgacggcacggcggcgtcagggtcgtcgcattctgcgaggaggcaagaaagttcgcattcagtgtgatagtgaagcaggtgctggggctgtcgccagaggagccggtcactgcaaggatactcgaggacttcctggccttcatgaagggcctcatctccttccccctctacatcccagggaccccatatgccaaggctgtccgggcgagagagaggatatccagcactgtgaagggcatcatcaaggagcggaggagcgctgggtcatggaacaagcagggcgacttccttgacgtgctgctgtcaagcaacgagctatctgacgaggagaaagtgagctttgtgctggactccctgctgggagggtatgagaccacctcgctcctcatctccatggtcgtttatttccttggccagtctgctcaagatctggacctggttaagagggagcacgacagcataagatccaacaaaggcaaggaggagtgcttgacttcagaagactacaagaagatggaatatacccaacaagtcatcaacgaggcgctgagatgcggcaacatcgtcaagttcgtccaccggaaggcgctgaaagacgtcaaatacaaagagtatctgattccatctggctggaaggtcctaccggtcttcactgccgttcatctgaacccctcacttcatggagacgcgcagcagtttcagccctgtaggtgggagggcacaagccaagggacaagcaagaggtttacaccgttcggtggtggcccccggctctgcccaggatcagagctcgctaaagtggagactgctttcttcctccatcaccttgtcctcaattataggacagacagtgttaatccacatgctaggaagtaa

SEQ ID NO: 386 - DNA, 1380 bp, synthetic construct
  source 1..1380: mol_type = other DNA; note = Dwarf11 coding sequence - Zm00001d003349_T001
atgatgatgatgatggcgggggagcacgtgctggccgctctggccaccctgcttctggcctcgctcctgaccctggtgctgaaccacttcctgcccttgcttctgaaccccaaggcccccaggggaagcttcgggtggccgctcctcggcgagacgctcaggttcctcacgccgcacgcctccaacacgctgggcggcttcctcgaggatcactgctccaggtatgggcgggtgttcaagtcccacctgttctgcaccccgacggtggtgtcctgcgaccaggacctcaaccacttcatcctgcagaacgaggagcggctgttccagtgcagctacccgaggccgatccatggcatcctgggcaagtcctccatgctcgtcgtcctgggcgaggaccacaagcgcctcaggaacctcgccctcgccctcgtcacctccaccaagctcaagcccagctacctaggcgacatcgagaagatcgcgctgcacgtcgtcggcgcatggcgacggcacggcggcgtcagggtcgtcgcattctgcgaggaggcaagaaagttcgcattcagtgtgatagtgaagcaggtgctggggctgtcgccagaggagccggtcactgcaaggatactcgaggacttcctggccttcatgaagggcctcatctccttccccctctacatcccagggaccccatatgccaaggctgtccgggcgagagagaggatatccagcactgtgaagggcatcatcaaggagcggaggagcgctgggtcatggaacaagcagggcgacttccttgacgtgctgctgtcaagcaacgagctatctgacgaggagaaagtgagctttgtgctggactccctgctgggagggtatgagaccacctcgctcctcatctccatggtcgtttatttccttggccagtctgctcaagatctggacctggttaagagggagcacgacagcataagatccaacaaaggcaaggaggagtgcttgacttcagaagactacaagaagatggaatatacccaacaagtcatcaacgaggcgctgagatgcggcaacatcgtcaagttcgtccaccggaaggcgctgaaagacgtcaaatacaaagagtatctgattccatctggctggaaggtcctaccggtcttcactgccgttcatctgaacccctcacttcatggagacgcgcagcagtttcagccctgtaggtgggagggcacaagccaagggacaagcaagaggtttacaccgttcggtggtggcccccggctctgcccaggatcagagctcgctaaagtggagactgctttcttcctccatcaccttgtcctcaattataggacagacagtgttaatccacatgctaggaagtaa

SEQ ID NO: 387 - protein, 459 aa, synthetic construct
  source 1..459: note = Dwarf11 protein sequence - Zm00001d003349_T001
MMMMMAGEHVLAALATLLLASLLTLVLNHFLPLLLNPKAPRGSFGWPLLGETLRFLTPHASNTLGGFLEDHCSRYGRVFKSHLFCTPTVVSCDQDLNHFILQNEERLFQCSYPRPIHGILGKSSMLVVLGEDHKRLRNLALALVTSTKLKPSYLGDIEKIALHVVGAWRRHGGVRVVAFCEEARKFAFSVIVKQVLGLSPEEPVTARILEDFLAFMKGLISFPLYIPGTPYAKAVRARERISSTVKGIIKERRSAGSWNKQGDFLDVLLSSNELSDEEKVSFVLDSLLGGYETTSLLISMVVYFLGQSAQDLDLVKREHDSIRSNKGKEECLTSEDYKKMEYTQQVINEALRCGNIVKFVHRKALKDVKYKEYLIPSGWKVLPVFTAVHLNPSLHGDAQQFQPCRWEGTSQGTSKRFTPFGGGPRLCPGSELAKVETAFFLHHLVLNYRTDSVNPHARK

SEQ ID NO: 388 - DNA, 4699 bp, Zea mays
  source 1..4699: mol_type = genomic DNA; note = Dwarf11 genomic sequence - B73_RefGen_v4:2:41027815:41032513:-1
agtttcctattagttgtcgttttggataaggttcgagtcaaatttataaaattttaactacaaataactattttattatttagttttggaacctaatatttatatgcatcaatttgtcataaaaagtacttttataaaagtataaatgtattaagagttcatttgtattttaacaaaaaacattggtcaaagttatattttgaagaccgtgtcgttgtcctaaacgacaactaataggaaaccggagggagtaaaattcaatagtgtgagattttaacccctgatcaatccactccattacttttactttaaacaagggtttatagagaaagagggaaaagaacactaagggctagtttgacaactttactttccaagtgattctattttttaaagagaaaaataaactaatttcttttagaaaaataaaaatctcttgagaaaataggctgcaaaactagctctaaataaataattaactaaacaaatgaaaagaaggcggctaaaagaaaggaaacaaaaggcagccttattttcccccttctctctccttcccctgccttctgctactatatagctccccctcaccttccgttctagagagagagaagggagaggcgagggagctcaccaggagagaggggcctgtgtgagcattgagcaaagcaaacgaagcagtacatacatctctcgctcgcagaggcccggccggccggctccatgcaacaagggacgacgagcggtggcggtgggcgatgatgatgatgatggcgggggagcacgtgctggccgctctggccaccctgcttctggcctcgctcctgaccctggtgctgaaccacttcctgcccttgcttctgaaccccaaggcccccaggggaagcttcgggtggccgctcctcggcgagacgctcaggttcctcacgccgcacgcctccaacacgctgggcggcttcctcgaggatcactgctccaggtacactgtgatactagtgccgtttgccgcgcgcgccggccggcccggcggccctttttttccccctttcttttttacctttttccaccgtccgtgcccgtgttccatgcacacggacggctcctagctgactagccaaccggccggccatatgagatggatggatggatggatggatggatcgatcgatcggtcttgttaccgtgcaattaagtatcgcgccattatttcatgtgacagcaaaaggtgacgcgctgcccgccggccgctgtcatgtctaagctagcagcagcagccttttttctcacggttttgttcttgggtcgttccgagaccgggacgacagtagtctgatctgatctgagagagtagtaaaaaaagaggagaaagtaaacaacggcgctcgacgatagattttacttacatgcatgcatgcatgcatggtcctactagcagctagctagctaatggcagcatgcattgttgatatgcaggtatgggcgggtgttcaagtcccacctgttctgcaccccgacggtggtgtcctgcgaccaggacctcaaccacttcatcctgcagaacgaggagcggctgttccagtgcagctacccgaggccgatccatggcatcctgggcaagtcctccatgctcgtcgtcctgggcgaggaccacaagcgcctcaggaacctcgccctcgccctcgtcacctccaccaagctcaagcccagctacctaggcgacatcgagaagatcgcgctgcacgtcgtcggcgcatggcgacggcacggcggcgtcagggtcgtcgcattctgcgaggaggcaagaaaggttcgtcatgttgcctctgcatcaatctttttgccatggagactctgtttgacttaccaggatcgtttcgttttcctttcctatttcctctgggccggccgcgcgtgtcctctgctctgtccttgagaaaagcacagttcgcattcagtgtgatagtgaagcaggtgctggggctgtcgccagaggagccggtcactgcaaggatactcgaggacttcctggccttcatgaagggcctcatctccttccccctctacatcccagggaccccatatgccaaggctgtccgggtaatcatccgccaccatgtgtctttagtagcacatgccatgcttgcttgcttgcttgcgttcgtaaagagcatccatgatccatctcttcattagtatatgcgtacaatacatacatagacacacactatgcttacatgtacataaccgtggctacgtttattttgttgcgtaaatcccaacggcaggcgagagagaggatatccagcactgtgaagggcatcatcaaggagcggaggagcgctgggtcatggaacaagcagggcgacttccttgacgtgctgctgtcaagcaacgagctatctgacgaggagaaagtgagctttgtgctggactccctgctgggagggtatgagaccacctcgctcctcatctccatggtcgtttatttccttggccagtctgctcaagatctggacctggttaaggtaacgatagtaataatcataatgtttaataataatatcactgtgaaagcacagcacagcacaggcacatcttttttttttgtgctggtttggcatcatcaataaattataagctatccatgaacatgcagagggagcacgacagcataagatccaacaaaggcaaggaggagtgcttgacttcagaagactacaagaagatggaatatacccaacaagtgagatagatgaccattcattcaatcaatatatacatgatgctagtagtattagaaatggaagtagtaaatatgataaatttttatttctgtgctgtaagtatgctgcagtatgtggaatagaaatgttgttgtcattcatgcccttcaccttcttgatcgcaggtcatcaacgaggcgctgagatgcggcaacatcgtcaagttcgtccaccggaaggcgctgaaagacgtcaaatacaaaggtgatgtagctagatgagccccccggccccagtcctgctcctgcatcgagagactttcgctgcagattccatctgtgctcatcacatgacagtggatcaggcagaggggatggccgcgcctttaagcctgatttttaagcgattgttttatgcccagaataacctcctatagcttttgctaaacgaagatgctcaaaaagcaagtggctctgccttttgctctgttgcagagtatctgattccatctggctggaaggtcctaccggtcttcactgccgttcatctgaacccctcacttcatggagacgcgcagcagtttcagccctgtaggtgggaggtacgctgcgctcccttctcaggagctcagactccttcctcattactactgttctgcacttgccatctaactataacggcaatgatccaatcatccatgttccatgaatagtgaaggttacctttgtgataatatatatggtgctacttaatcaaaactgaatgaaataataggaatcaaaggcagagaacctatcaaacaagcttatcaggggcttttgctcttagggaatcttctttaaagtgtgcactctaactaattgctacctttagttagtgtgtgtccatctgtgacatagttactctcaactgttctggtatgttcagatggcaagcatgctgcctgatgtagtgcttgttggttgttaatggtcctaaccatgattccgttcgttgaaagccagccctctgggctttgctccgattttttttttcttcttcaatgatgttcatggtctcattaattttgtgtgactcatctgattgatgtataccagggcacaagccaagggacaagcaagaggtttacaccgttcggtggtggcccccggctctgcccaggatcagagctcgctaaagtggagactgctttcttcctccatcaccttgtcctcaattataggtaaataaacaaaggacggtgttattagtcctaactgagttggtggatttttggcaaaccaaagcacggtacacctgaacatcatgcaaaattctaaccaaacctaaggaaatcttgtggcaggacagacagtgttaatccacatgctaggaagtaatggcaacaaggttatgacagcactgttaaatggaaaatatattatgaggaaaaaatgaacaaggactcacaatatcgagattgatagtgtccaactagtaagaaaaactatagcaagtgatggcaacaaggttacgataacaactggcctctctaatttatgtttttgtcaacagggaccacaggtctcaaaataaatgtttaactaattttggatccaggactgtagagcatatatatcagaagataccatacagtacaaatatgggcagctttaggttttcgacaagtaggctatgcaagttgagtgttatcatacaagatatagaattctgaaatatgaccaaaccgccaaaatgttgcccatgataatcttaagccaactgaatgtttagtaataaggcgtttctttcactgttattgttctttcagagtagtaaaactacttagggcttgtttgggaccaagtgaaacaaagagaattgagggggctataatcccttgttattcaaaattgaatagcaagggattatagtcccctcaattctctttgttccacctactcccaaacaagcccttacagttttagaaacgcaataag

SEQ ID NO: 389 - DNA, 1501 bp, synthetic construct
  source 1..1501: mol_type = other DNA; note = Myb80 cDNA sequence - Zm00001d025664_T001
ggcactgctcgctcgctcgctacgcggacctgtggcgtacgcgtaccactccgagacagcaggcgcgtgcgagagcagcccggcgaggatggggcggatcccgtgctgcgagaaggacagcgtcaagcgcgggcagtggacgcccgaggaggacaacaagctgctctcctacatcacccagtacggcacgcgcaactggcgcctcatccccaagaatgccggactgcagcgatgcgggaagagctgccggctccggtggaccaactacctgcgtcccgacctcaagcacggtgagttcacggacaccgaggagcagaccatcatcaagctgcactccgtcgttggcaacaggtggtcggtgatcgcggcgcagctgccgggtcggacggacaacgacgtcaagaaccactggaacaccaagctgaagaagaagctgtccgggatgggcatcgaccccatcacgcacaagtccttctcgcacctcatggccgagatcgccaccacgctggcgccgccgcaggtggcccacctcgccgaggccgcgctggggtgcttcaaggacgagatgctccacctcctcaccaagaagcgccccaccgacttcccgtcgcccgcggtgcccgacatgtcggcgatcgcgggcggctccggcgtcgcggcgccctgcggcttcccggcgccgccccagaccgacgacaccatcgagcgcatcaagctgggcctgtcccgcgccatcatgagcgagcccgccgcgccccccggcaagcaggagcagccctgggcgccggccgacttgccggaggggctgccggggatgtacgccacgtacaatcccgcctcgcacggacacgaagagttccgctacgacaacgggacagtgccggagtacgtcctcggcggcggcggcggcgcggaccagggcacgtcgatgtggagccaccagagcatgtacagcgggagttcggccacggaggccgcgcccaggccggcggaggtgttgccggagaaaggcaacgacagcgtcgggagcagcggcggcggcgaggaggcggacgacgtcaaggacggcgggaaaggcggctccgatatgtccggcctgtttggatccgactgcgtactttgggacttgcccgacgagctgaccaatcacatggtgtgatcaataccgttcgtgcgaagtcgccgggatcaaagagcgtttcatcaaaggagaagaagaagaagcaccagaacaaaatattgccaaaaggtttcataaactcgaataaggaatacggaaatcatgtatataattttgtcatttgattagaagaaatgtgcatgtagaaccgaggagaccattcaattttagtttggactcctctgtttcaggagcaagtgctcagagtaacgacagtaacagtgcaaaaaaaccgcaaaatgttgtctccaattcaactcgagttgtctaatcatgtcactatacaaaggaatttcccccattttccctggattcctttga

SEQ ID NO: 390 - DNA, 1071 bp, synthetic construct
  source 1..1071: mol_type = other DNA; note = Myb80 coding sequence - Zm00001d025664_T001
atggggcggatcccgtgctgcgagaaggacagcgtcaagcgcgggcagtggacgcccgaggaggacaacaagctgctctcctacatcacccagtacggcacgcgcaactggcgcctcatccccaagaatgccggactgcagcgatgcgggaagagctgccggctccggtggaccaactacctgcgtcccgacctcaagcacggtgagttcacggacaccgaggagcagaccatcatcaagctgcactccgtcgttggcaacaggtggtcggtgatcgcggcgcagctgccgggtcggacggacaacgacgtcaagaaccactggaacaccaagctgaagaagaagctgtccgggatgggcatcgaccccatcacgcacaagtccttctcgcacctcatggccgagatcgccaccacgctggcgccgccgcaggtggcccacctcgccgaggccgcgctggggtgcttcaaggacgagatgctccacctcctcaccaagaagcgccccaccgacttcccgtcgcccgcggtgcccgacatgtcggcgatcgcgggcggctccggcgtcgcggcgccctgcggcttcccggcgccgccccagaccgacgacaccatcgagcgcatcaagctgggcctgtcccgcgccatcatgagcgagcccgccgcgccccccggcaagcaggagcagccctgggcgccggccgacttgccggaggggctgccggggatgtacgccacgtacaatcccgcctcgcacggacacgaagagttccgctacgacaacgggacagtgccggagtacgtcctcggcggcggcggcggcgcggaccagggcacgtcgatgtggagccaccagagcatgtacagcgggagttcggccacggaggccgcgcccaggccggcggaggtgttgccggagaaaggcaacgacagcgtcgggagcagcggcggcggcgaggaggcggacgacgtcaaggacggcgggaaaggcggctccgatatgtccggcctgtttggatccgactgcgtactttgggacttgcccgacgagctgaccaatcacatggtgtga

SEQ ID NO: 391 - protein, 356 aa, synthetic construct
  source 1..356: note = Myb80 protein sequence - Zm00001d025664_T001
MGRIPCCEKDSVKRGQWTPEEDNKLLSYITQYGTRNWRLIPKNAGLQRCGKSCRLRWTNYLRPDLKHGEFTDTEEQTIIKLHSVVGNRWSVIAAQLPGRTDNDVKNHWNTKLKKKLSGMGIDPITHKSFSHLMAEIATTLAPPQVAHLAEAALGCFKDEMLHLLTKKRPTDFPSPAVPDMSAIAGGSGVAAPCGFPAPPQTDDTIERIKLGLSRAIMSEPAAPPGKQEQPWAPADLPEGLPGMYATYNPASHGHEEFRYDNGTVPEYVLGGGGGADQGTSMWSHQSMYSGSSATEAAPRPAEVLPEKGNDSVGSSGGGEEADDVKDGGKGGSDMSGLFGSDCVLWDLPDELTNHMV

SEQ ID NO: 392 - DNA, 2874 bp, Zea mays
  source 1..2874: mol_type = genomic DNA; note = Myb80 genomic sequence - B73_RefGen_v4:10:125369198:125372071:-1
atcaatcgaagattagcagtgtggattagtccattgaagttcactgaagaaccacgcacgcataacaccgaccgttctgttttgaccgacggggcgcgaagaactgaagaaccacgcacgcataacgcatccggcacggccgctcggcaggctgtgcactgtatctccatcggaaagtacacttccatggccccgtcgacgcgccacgccacgcgcgtcgattagcgccgcgggagccgacggacgggacgcaaacgcgccgggtgaccgggtcctggcgaagggggggggggggggggggggggggggggggggggggggggggggggggagctctgcttggaccgggggttgacccggcgctgtgcgggtgggcaacctgtccctgctccccgggggcggtcacgcgttgcacgggcgttgaattctttatgccgctcatgcctccttcgcccgtgcgcgccgcgcccgcccctccgggcgcatgccgccggcagcagcaaacagcagcagccaggacgagccgcggatcgcacgagcgggtgccgccgcgcgcctatttatgcgcccggcgcgcaatgtgagcgccgcaatagctggggcactgctcgctcgctcgctacgcggacctgtggcgtacgcgtaccactccgagacagcaggcgcgtgcgagagcagcccggcgaggatggggcggatcccgtgctgcgagaaggacagcgtcaagcgcgggcagtggacgcccgaggaggacaacaagctgctctcctacatcacccagtacggcacgcgcaactggcgcctcatccccaagaatgccggtacgtcctagcgaccgtccaatgtccgcgtgtcgtgtagttcctctcaagtgtgaccgagtccgcgtgatgggattgcaggactgcagcgatgcgggaagagctgccggctccggtggaccaactacctgcgtcccgacctcaagcacggtgagttcacggacaccgaggagcagaccatcatcaagctgcactccgtcgttggcaacaggtggcccgcccgtcctcccctctcgtcgtgcctcttctgatgggtgcctgttctgactacaagcaatgtgcaacaaacgcgcgcgcgtgcaggtggtcggtgatcgcggcgcagctgccgggtcggacggacaacgacgtcaagaaccactggaacaccaagctgaagaagaagctgtccgggatgggcatcgaccccatcacgcacaagtccttctcgcacctcatggccgagatcgccaccacgctggcgccgccgcaggtggcccacctcgccgaggccgcgctggggtgcttcaaggacgagatgctccacctcctcaccaagaagcgccccaccgacttcccgtcgcccgcggtgcccgacatgtcggcgatcgcgggcggctccggcgtcgcggcgccctgcggcttcccggcgccgccccagaccgacgacaccatcgagcgcatcaagctgggcctgtcccgcgccatcatgagcgagcccgccgcgccccccggcaagcaggagcagccctgggcgccggccgacttgccggaggggctgccggggatgtacgccacgtacaatcccgcctcgcacggacacgaagagttccgctacgacaacgggacagtgccggagtacgtcctcggcggcggcggcggcgcggaccagggcacgtcgatgtggagccaccagagcatgtacagcgggagttcggccacggaggccgcgcccaggccggcggaggtgttgccggagaaaggcaacgacagcgtcgggagcagcggcggcggcgaggaggcggacgacgtcaaggacggcgggaaaggcggctccgatatgtccggcctgtttggatccgactgcgtactttgggacttgcccgacgagctgaccaatcacatggtgtgatcaataccgttcgtgcgaagtcgccgggatcaaagagcgtttcatcaaaggagaagaagaagaagcaccagaacaaaatattgccaaaaggtttcataaactcgaataaggaatacggaaatcatgtatataattttgtcatttgattagaagaaatgtgcatgtagaaccgaggagaccattcaattttagtttggactcctctgtttcaggagcaagtgctcagagtaacgacagtaacagtgcaaaaaaaccgcaaaatgttgtctccaattcaactcgagttgtctaatcatgtcactatacaaaggaatttcccccattttccctggattcctttgaatctttttttatgtgaattcgttttatctgaagaatgcgttgtagtatgattctgtggattacagagagaacagagtgcccccgacttcaagaattcctttcctctgtgtctgatcggacggtcgtgatgagcccgcggtgaggttaatagcatccgacggttatagagagcgcactcccaagttcaccttcctctgcctgtagatcttctagagtcccgtatacggtttcgtctttcgtgtcccacttccatggcggcggcggcgcagctgcacggatcggctgcggccacggtggcatatcgcgggactcgagcctactcagttccatcctcatgccggtggccgcagtctggttccccgaaggtatgccttggattcgggtgctaaaccctaatttgatagtcttgaagctcttgcccctgtgtgcgcgatcgttgtctgcgactgcgaagaacctggtataagggttacctagacattggtgacgaccatatggaaatgagatccgatcggatcgcgaagaggtgagggagaggacgtataagaggttgtttgatgacttggtgagttggtgttgatgggcatttgcgcagaaatc
